(19) United States
(12) Patent Application Publication
(10) Pub. No.: US 2021/0277379 A1
(43) Pub. Date: Sep. 9, 2021

(54) MULTI-EFFECTOR NUCLEOBASE EDITORS AND METHODS OF USING SAME TO MODIFY A NUCLEIC ACID TARGET SEQUENCE

(71) Applicant: Beam Therapeutics Inc., Cambridge, MA (US)

(72) Inventors: Nicole Gaudelli, Cambridge, MA (US); John Evans, Cambridge, MA (US)

(73) Assignee: Beam Therapeutics Inc., Cambridge, MA (US)

(21) Appl. No.: 17/265,440

(22) PCT Filed: Aug. 2, 2019
(86) PCT No.: PCT/US2019/044935

§ 371 Date: Feb. 2, 2021

Related U.S. Application Data
(60) Provisional application No. 62/714,550, filed on Aug. 3, 2018.

(51) Int. Cl. C12N 9/78; C12N 9/22; C12N 15/90

(52) U.S. Cl. CPC C12N 9/78; C12Y 305/04004; C12N 2800/80; C12N 9/22; C12N 15/907; C12Y 305/04005

(57) ABSTRACT

The invention features a multi-effector nucleobase editor capable of inducing changes at multiple different bases within a target nucleic acid and methods of using such editors.

### CROSS-REFERENCE TO RELATED APPLICATION

[0001] This application claims the benefit of U.S. Provisional Patent Application No. 62/714,550, filed on Aug. 3, 2018, the entire contents of which are hereby incorporated by reference herein.

### BACKGROUND

[0002] Targeted editing of nucleic acid sequences, for example, the targeted cleavage or the targeted introduction of a specific modification into genomic DNA is a highly promising approach for the study of gene function and also has the potential to provide new therapies for human genetic diseases. Currently available base editors include cytidine base editors (e.g., BE4) that convert target C•G to T•A and adenine base editors (e.g., ABE7.10) that convert target A•T to G•C. There is a need in the art for base editors capable of inducing novel types of modifications within a target sequence.

### SUMMARY OF THE DISCLOSURE

[0003] As described below, the present invention features multi-effector nucleobase editors capable of inducing changes at multiple different bases within a target nucleic acid and methods of using such editors.

[0004] In one aspect, the invention features a multi-effector nucleobase editor polypeptide comprising an adenosine deaminase, a cytidine deaminase, and/or a DNA glycosylase domain, where the aforementioned domains are fused to a polynucleotide binding domain, thereby forming a nucleobase editor capable of inducing changes at multiple different bases in a nucleic acid molecule. In one embodiment, the polypeptide further comprises one or more Nuclear Localization Signals (NLS). In another embodiment, the NLS is a bipartite NLS. In another embodiment, the polypeptide comprises an N-terminal NLS and a C-terminal NLS. In another embodiment, the polypeptide further comprises one or more Uracil DNA glycosylase inhibitors (UGI). In another embodiment, the adenosine deaminase is a TadA deaminase. In another embodiment, the TadA deaminase is a modified adenosine deaminase that does not occur in nature. In another embodiment, the polypeptide comprises two adenosine deaminases that are the same or different. In another embodiment, the two adenosine deaminases are capable of forming hetero or homodimers. In another embodiment, the adenosine deaminase domains are wild-type TadA and TadA7.10. In another embodiment, the domain having nucleic acid sequence specific binding activity is a nucleic acid programmable DNA binding protein (napDNAbp). In another embodiment, the napDNAbp domain comprises a nuclease dead Cas9 (dCas9), a Cas9 nickase (nCas9), or a nuclease active Cas9. In another embodiment, the napDNAbp is selected from the group consisting of Cas9, Cas12a/Cpf1, Cas12b/C2c1, Cas12c/C2c3, Cas12d/CasY, Cas12e/CasX, Cas12g, Cas12h, and Cas12i or active fragments thereof. In certain embodiments, the napDNAbp domain contains a Cas9 domain, a Cas12a domain, a Cas12b domain, a Cas12c domain, a Cas12d domain, a Cas12e domain, a Cas12f domain, a Cas12g domain, Cas12h domain, Cas12i domain, or an argonaute domain. In another embodiment, the napDNAbp domain comprises a catalytic domain capable of cleaving the reverse complement strand of the nucleic acid sequence. In another embodiment, the napDNAbp domain does not comprise a catalytic domain capable of cleaving the nucleic acid sequence. In another embodiment, the Cas9 is dCas9 or nCas9. In another embodiment, the cytidine deaminase is Petromyzon marinus cytosine deaminase 1 (pCDM), or Activation-induced cytidine deaminase (AICDA). In another embodiment, the polypeptide further comprises an abasic nucleobase editor. In another embodiment, UGI is derived from Bacillus subtilis bacteriophage PBS1 and inhibits human UDG activity.

[0005] In another aspect, the invention features a multi-effector nucleobase editor polypeptide comprising one or more Nuclear Localization Signal (NLS), a napDNAbp, a Uracil DNA glycosylase inhibitor, an adenosine deaminase, and a cytidine deaminase. In one embodiment, the polypeptide comprises two NLS. In one embodiment, one NLS is a bipartite NLS. In another embodiment, the polypeptide comprises two Uracil DNA glycosylase inhibitors. In another embodiment, the polypeptide comprises two adenosine deaminases and a cytidine deaminase, or an abasic nucleobase editor and a cytidine deaminase, or an abasic nucleobase editor and an adenosine deaminase.

[0006] In one aspect, the invention features a Multi-Effector Nucleobase Editor polypeptide comprising the following domains A-C, A-D, or A-E:

NH₂-[A-B-C]-COOH,

NH₂-[A-B-C-D]-COOH, or

NH₂-[A-B-C-D-E]-COOH

wherein A and C or A, C, and E, each comprises one or more of the following:

[0007] an adenosine deaminase domain or an active fragment thereof,

[0008] a cytidine deaminase domain or an active fragment thereof,

[0009] a DNA glycosylase domain or an active fragment thereof; and

wherein B or B and D, each comprises one or more domains having nucleic acid sequence specific binding activity. In one embodiment, the Multi-Effector Nucleobase Editor polypeptide of the previous aspect contains:

NH₂-[Aₙ-Bₒ-Cₙ]-COOH,

NH₂-[Aₙ-Bₒ-Cₙ-Dₒ]-COOH, or

NH₂-[Aₙ-Bₒ-Cₚ-Dₒ-E_{q}]-COOH;

wherein A and C or A, C, and E, each comprises one or more of the following:

[0010] an adenosine deaminase domain or an active fragment thereof,

[0011] a cytidine deaminase domain or an active fragment thereof,

[0012] a DNA glycosylase domain or an active fragment thereof; and

[0013] wherein n is an integer: 1, 2, 3, 4, or 5, wherein p is an integer: 0, 1, 2, 3, 4, or 5;

wherein q is an integer 0, 1, 2, 3, 4, or 5; and wherein B or B and D each comprises a domain having nucleic acid sequence specific binding activity; and wherein o is an integer: 1, 2, 3, 4, or 5. In one embodiment, the polypeptide contains one or more nuclear localization sequences. In one embodiment, the polypeptide contains at least one of said nuclear localization sequences is at the N-terminus or C-terminus. In one embodiment, the polypeptide contains the nuclear localization signal is a bipartite nuclear localization signal. In one embodiment, the polypeptide contains one or more domains linked by a linker. In one embodiment, the adenosine deaminase is a TadA deaminase. In one embodiment, the TadA is a modified adenosine deaminase that does not occur in nature. In another embodiment, the polypeptide comprises two adenosine deaminase domains that are the same or different. In one embodiment, the two adenosine deaminase domains are capable of forming hetero or homodimers. In one embodiment, the adenosine deaminase domains are wild-type TadA and TadA7.10. In one embodiment, the polypeptide contains a domain having nucleic acid sequence specific binding activity is a nucleic acid programmable DNA binding protein (napDNAbp). In one embodiment, the napDNAbp domain comprises a nuclease dead Cas9 (dCas9), a Cas9 nickase (nCas9), or a nuclease active Cas9. In one embodiment, the napDNAbp is selected from the group consisting of Cas9, Cas12a/Cpf1, Cas12b/C2c1, Cas12c/C2c3, Cas12d/CasY, Cas12e/CasX, Cas12g, Cas12h, and Cas12i, or active fragments thereof. In one embodiment, the napDNAbp domain comprises a catalytic domain capable of cleaving the reverse complement strand of the nucleic acid sequence. In one embodiment, the napDNAbp domain does not comprise a catalytic domain capable of cleaving the nucleic acid sequence. In one embodiment, the Cas9 is dCas9 or nCas9. In one embodiment, the napDNAbp comprises a nucleobase editor. In one embodiment, the nucleobase editor is a cytidine deaminase or an adenosine deaminase. In one embodiment, the cytidine deaminase is Petromyzon marinus cytosine deaminase 1 (pCDM), or Activation-induced cytidine deaminase (AICDA). In some embodiments, the polypeptide comprises 0, 1, or 2 uracil glycosylase inhibitors or active fragments thereof.

[0014] In another aspect the invention features a polynucleotide molecule encoding the multi-effector nucleobase editor polypeptide of any one the previous aspect or as delineated herein. In one embodiment, the polynucleotide is codon optimized.

[0015] In another aspect the invention features a expression vector comprising a polynucleotide molecule of a previous claim. In one embodiment, the expression vector is a mammalian expression vector. In one embodiment, the vector is a viral vector selected from the group consisting of adeno-associated virus (AAV), retroviral vector, adenoviral vector, lentiviral vector, Sendai virus vector, and herpesvirus vector. In another embodiment, the vector comprises a promoter.

[0016] In another aspect the invention features a cell comprising the polynucleotide of aany previous aspect or an aforementioned vector. In one embodiment, the cell is a bacterial cell, plant cell, insect cell, or mammalian cell.

[0017] In another aspect, the invention features a molecular complex comprising the multi-effector nucleobase editor polypeptide of any previous claim and one or more of a guide RNA, tracrRNA, or target DNA molecule.

[0018] In another aspect, the invention features a kit comprising the multi-effector nucleobase editor polypeptide of a previous aspect, the polynucleotide of a previous aspect, the vector of a previous aspect or the molecular complex of a previous aspect.

[0019] In another aspect, the invention features a method of editing a nucleobase of a nucleic acid sequence, the method comprising contacting a nucleic acid sequence with a base editor comprising: the multi-effector nucleobase editor polypeptide of any previous aspect and converting a first nucleobase of the DNA sequence to a second nucleobase. In one embodiment, the first nucleobase is cytosine and the second nucleobase is thymine. In one embodiment, the first nucleobase is adenine and the second nucleobase is guanine. In another embodiment, the method further comprises converting a third to a fourth nucleobase. In one embodiment, the third nucleobase is guanine and the fourth nucleobase is adenine. In another embodiment, the third nucleobase is thymine and the fourth nucleobase is cytosine. In another embodiment, the nucleic acid sequence encodes a complementarity determining region (CDR).

[0020] In another aspect, the invention features a method of editing a regulatory sequence present in the genome of a cell, the method comprising contacting a regulatory sequence with a base editor comprising: the multi-effector nucleobase editor polypeptide of any previous aspect and converting a first and second nucleobase of the DNA sequence to a third and fourth nucleobase.

[0021] In yet another aspect, the invention features a method of editing a genome of a cell, the method comprising contacting the genome with a base editor comprising: the multi-effector nucleobase editor polypeptide of any previous aspect and converting a first and second nucleobase of the DNA sequence to a third and fourth nucleobase. In one embodiment, the method further includes characterizing the effect of the editing on the genome.

[0022] Other features and advantages of the invention will be apparent from the detailed description, and from the claims.

### Definitions

[0023] The following definitions supplement those in the art and are directed to the current application and are not to be imputed to any related or unrelated case, e.g., to any commonly owned patent or application. Although any methods and materials similar or equivalent to those described herein can be used in the practice for testing of the present disclosure, the preferred materials and methods are described herein. Accordingly, the terminology used herein is for the purpose of describing particular embodiments only, and is not intended to be limiting.

[0024] Unless defined otherwise, all technical and scientific terms used herein have the meaning commonly understood by a person skilled in the art to which this invention belongs. The following references provide one of skill with a general definition of many of the terms used in this invention: Singleton et al., Dictionary of Microbiology and Molecular Biology (2nd ed. 1994); The Cambridge Dictionary of Science and Technology (Walker ed., 1988); The Glossary of Genetics, 5th Ed., R. Rieger et al. (eds.), Springer Verlag (1991); and Hale & Marham, The Harper Collins Dictionary of Biology (1991). As used herein, the following terms have the meanings ascribed to them below, unless specified otherwise.

[0025] In this application, the use of the singular includes the plural unless specifically stated otherwise. It must be noted that, as used in the specification, the singular forms “a,” “an” and “the” include plural referents unless the context clearly dictates otherwise. In this application, the use of “or” means “and/or” unless stated otherwise. Furthermore, use of the term “including” as well as other forms, such as “include”, “includes,” and “included,” is not limiting.

[0026] As used in this specification and claim(s), the words “comprising” (and any form of comprising, such as “comprise” and “comprises”), “having” (and any form of having, such as “have” and “has”), “including” (and any form of including, such as “includes” and “include”) or “containing” (and any form of containing, such as “contains” and “contain”) are inclusive or open-ended and do not exclude additional, unrecited elements or method steps. It is contemplated that any embodiment discussed in this specification can be implemented with respect to any method or composition of the present disclosure, and vice versa. Furthermore, compositions of the present disclosure can be used to achieve methods of the present disclosure.

[0027] The term “about” or “approximately” means within an acceptable error range for the particular value as determined by one of ordinary skill in the art, which will depend in part on how the value is measured or determined, i.e., the limitations of the measurement system. For example, “about” can mean within 1 or more than 1 standard deviation, per the practice in the art. Alternatively, “about” can mean a range of up to 20%, up to 10%, up to 5%, or up to 1% of a given value. Alternatively, particularly with respect to biological systems or processes, the term can mean within an order of magnitude, e.g., within 5-fold, within 2-fold of a value. Where particular values are described in the application and claims, unless otherwise stated, the term “about” means within an acceptable error range for the particular value should be assumed.

[0028] Reference in the specification to “some embodiments,” “an embodiment,” “one embodiment” or “other embodiments” means that a particular feature, structure, or characteristic described in connection with the embodiments is included in at least some embodiments, but not necessarily all embodiments, of the present disclosures.

[0029] By “abasic base editor” is meant an agent capable of excising a nucleobase and inserting a DNA nucleobase (A, T, C, or G). Abasic base editors comprise a nucleic acid glycosylase polypeptide or fragment thereof. In one embodiment, the nucleic acid glycosylase is a mutant human uracil DNA glycosylase comprising an Asp at amino acid 204 (e.g., replacing an Asn at amino acid 204) in the following sequence, or corresponding position in a uracil DNA glycosylase, and having cytosine-DNA glycosylase activity, or active fragment thereof. In one embodiment, the nucleic acid glycosylase is a mutant human uracil DNA glycosylase comprising an Ala, Gly, Cys, or Ser at amino acid 147 (e.g., replacing a Tyr at amino acid 147) in the following sequence, or corresponding position in a uracil DNA glycosylase, and having thymine-DNA glycosylase activity, or an active fragment thereof. The sequence of exemplary human uracil-DNA glycosylase, isoform 1, follows:

| | |
|---|---|
| 1 | mgvfclgpwg lgrklrtpgk gplqllsrlc |
| | gdhlqaipak kapagqeepg tppssplsae |
| 61 | qldrigrnka aallrlaarn vpvgfgeswk |
| | khlsgefgkp yfiklmgfva eerkhytvyp |
| 121 | pphqvftwtq mcdikdvkvv ilgqdpyhgp |
| | nqahglcfsv grpvppppsl eniykelstd |
| 181 | iedfvhpghg dlsgwakqgv lllnavltvr |
| | ahqanshker gweqftdavv swlnqnsngl |
| 241 | vfllwgsyaq kkgsaidrkr hhvlqtahps |
| | plsvyrgffg crhfsktnel lqksgkkpid |
| 301 | wkel |

The sequence of human uracil-DNA glycosylase, isoform 2, follows:

| | |
|---|---|
| 1 | migqktlysf fspsparkrh apspepavqg |
| | tgvagvpees gdaaaipakk apagqeepgt |
| 61 | ppssplsaeq ldriqrnkaa allrlaarnv |
| | pvgfgeswkk hlsgefgkpy fiklmgfvae |
| 121 | erkhytvypp phqvftwtqm cdikdvkvvi |
| | lgqdpyhgpn qahglcfsvg rpvppppsle |
| 181 | niykelstdi edfvhpghgd lsgwakqgvl |
| | llnavltvra hqanshkerg weqftdavvs |
| 241 | wlnqnsnglv fllwgsyaqk kgsaidrkrh |
| | hvlqtahpsp lsvyrgffgc rhfsktnell |
| 301 | qksgkkpidw kel |

In other embodiments, the abasic editor is any one of the abasic editors described in PCT/JP2015/080958 and US20170321210, which are incorporated herein by reference. In particular embodiments, the abasic editor comprises a mutation at a position shown in the sequence above in bold with underlining or at a corresponding amino acid in any other abasic editor or uracil deglycosylase known in the art. In one embodiment, the abasic editor comprises a mutation at Y147, N204, L272, and/or R276, or corresponding position. In another embodiment, the abasic editor comprises a Y147A or Y147G mutation, or corresponding mutation. In another embodiment, the abasic editor comprises a N204D mutation, or corresponding mutation. In another embodiment, the abasic editor comprises an L272A mutation, or corresponding mutation. In another embodiment, the abasic editor comprises a R276E or R276C mutation, or corresponding mutation.

[0030] By “adenosine deaminase” is meant a polypeptide or fragment thereof capable of catalyzing the hydrolytic deamination of adenine or adenosine. In some embodiments, the deaminase or deaminase domain is an adenosine deaminase catalyzing the hydrolytic deamination of adenosine to inosine or deoxy adenosine to deoxyinosine. In some embodiments, the adenosine deaminase catalyzes the hydrolytic deamination of adenine or adenosine in deoxyribonucleic acid (DNA). The adenosine deaminases (e.g., engineered adenosine deaminases, evolved adenosine deaminases) provided herein may be from any organism, such as a bacterium.

[0031] In some embodiments, the adenosine deaminase comprises an alteration in the following sequence:

MSEVEFSHEYWMRHALTLAKRARDEREVPVGAVLVLNNRVIGEGWNR
AIGLHDPTAHAEIMALRQGGLVMQNYRLIDATLYVTFEPCVMCAGAM
IHSRIGRVVFGVRNAKTGAAGSLMDVLHYPGMNHRVEITEGILADEC
AALLCYFFRMPRQVFNAQKKAQSSTD.
(also termed TadA*7.10)

[0032] In some embodiments, TadA*7.10 comprises an alteration at amino acid 82 or 166. In particular embodiments, a variant of the above-referenced sequence comprises one or more of the following alterations: Y147T, Y147R, Q154S, Y123H, V82S, T166R, and Q154R. The alteration Y123H refers to the alteration H123Y in TadA*7.10 reverted back to Y123H TadA(wt). In other embodiments, a variant of the TadA*7.10 sequence comprises a combination of alterations selected from the group consisting of Y147R+Q154R+Y123H; Y147R+Q154R+I76Y; Y147R+Q154R+T166R; Y147T+Q154R; Y147T+Q154S; V82S+Q154S; and Y123H+Y147R+Q154R+I76Y. In still other embodiments, the adenosine deaminase variant is a homodimer comprising two adenosine deaminase domains each having one or more of the following alterations Y147T, Y147R, Q154S, Y123H, V82S, T166R, Q154R.

[0033] In particular embodiments, an adenosine deaminase domain is selected from one of the following:

Staphylococcus aureus (S. aureus) TadA:
MGSHMTNDIYFMTLAIEEAKKAAQLGEVPIGAIITKDDEVIARAHNLRETLQQPTAH
AEHIAIERAAKVLGSWRLEGCTLYVTLEPCVMCAGTIVMSRIPRVVYGADDPKGGCSGS
LMNLLQQSNFNHRAIVDKGVLKEACSTLLTTFFKNLRANKKSTN
Bacillus subtilis (B. subtilis) TadA:
MTQDELYMKEAIKEAKKAEEKGEVPIGAVLVINGEIIARAHNLRETEQRSIAHAEML
VIDEACKALGTWRLEGATLYVTLEPCPMCAGAVVLSRVEKVVFGAFDPKGGCSGTLMN
LLQEERFNHQAEVVSGVLEEECGGMLSAFFRELRKKKKAARKNLSE
Salmonella typhimurium (S. typhimurium) TadA:
MPPAFITGVTSLSDVELDHEYWMRHALTLAKRAWDEREVPVGAVLVHNHRVIGEG
WNRPIGRHDPTAHAEIMALRQGGLVLQNYRLLDTTLYVTLEPCVMCAGAMVHSRIG
RVVFGARDAKTGAAGSLIDVLHHPGMNHRVEIIEGVLRDECATLLSDFFRMRRQEIK
ALKKADRAEGAGPAV
Shewanella putrefaciens (S. putrefaciens) TadA:
MDEYWMQVAMQMAEKAEAAGEVPVGAVLVKDGQQIATGYNLSISQHDPTAHAEI
LCLRSAGKKLENYRLLDATLYITLEPCAMCAGAMVHSRIARVVYGARDEKTGAAGT
VVNLLQHPAFNHQVEVTSGVLAEACSAQLSRFFKRRRDEKKALKLAQRAQQGIE
Haemophilus influenzae F3031 (H. influenzae) TadA:
MDAAKVRSEFDEKMMRYALELADKAEALGEIPVGAVLVDDARNIIGEGWNLSIVQSDPTAH
AEIIALRNGAKNIQNYRLLNSTLYVTLEPCTMCAGAILHSRIKRLVFGASDYK
TGAIGSRFHFFDDYKMNHTLEITSGVLAEECSQKLSTFFQKRREEKKIEKALLKSLSDK
Caulobacter crescentus (C. crescentus) TadA:
MRTDESEDQDHRMMRLALDAARAAAEAGETPVGAVILDPSTGEVIATAGNGPIAAH
DPTAHAEIAAMRAAAAKLGNYRLTDLTLVVTLEPCAMCAGAISHARIGRVVFGADD
PKGGAVVHGPKFFAQPTCHWRPEVTGGVLADESADLLRGFFRARRKAM
Geobacter sulfurreducens (G. sulfurreducens) TadA:
MSSLKKTPIRDDAYWMGKAIREAAKAAARDEVPIGAVIVRDGAVIGRGHNLREGSN
DPSAHAEMIAIRQAARRSANWRLTGATLYVTLEPCLMCMGAIILARLERVVFGCYDP
KGGAAGSLYDLSADPRLNHQVRLSPGVCQEECGTMLSDFFRDLRRRKKAKATPALF
IDERKVPPEP
TadA*7.10:
MSEVEFSHEYWMRHALTLAKRARDEREVPVGAVLVLNNRVIGEGWNRAIGLHDPTAHAEIMA
LRQGGLVMQNYRLIDATLYVTFEPCVMCAGAMIHSRIGRVVFGVRNAKTGAAGSLMDVLHYP
GMNHRVEITEGILADECAALLCYFFRMPRQVFNAQKKAQSSTD.

[0034] “Administering” is referred to herein as providing one or more compositions described herein to a patient or a subject. By way of example and without limitation, composition administration, e.g., injection, can be performed by intravenous (i.v.) injection, sub-cutaneous (s.c.) injection, intradermal (i.d.) injection, intraperitoneal (i.p.) injection, or intramuscular (i.m.) injection. One or more such routes can be employed. Parenteral administration can be, for example, by bolus injection or by gradual perfusion over time. Alternatively, or concurrently, administration can be by an oral route.

[0035] By “agent” is meant any small molecule chemical compound, antibody, nucleic acid molecule, or polypeptide, or fragments thereof.

[0036] By “alteration” is meant a change (increase or decrease) in the expression levels or activity of a gene or polypeptide as detected by standard art known methods such as those described herein. As used herein, an alteration includes a 10% change in expression levels, a 25% change, a 40% change, and a 50% or greater change in expression levels.

[0037] By “ameliorate” is meant decrease, suppress, attenuate, diminish, arrest, or stabilize the development or progression of a disease.

[0038] By “analog” is meant a molecule that is not identical, but has analogous functional or structural features. For example, a polypeptide analog retains the biological activity of a corresponding naturally-occurring polypeptide, while having certain biochemical modifications that enhance the analog's function relative to a naturally occurring polypeptide. Such biochemical modifications could increase the analog's protease resistance, membrane permeability, or half-life, without altering, for example, ligand binding. An analog may include an unnatural amino acid.

[0039] By “base editor (BE),” or “nucleobase editor (NBE)” is meant an agent that binds a polynucleotide and has nucleobase modifying activity. In various embodiments, the base editor comprises a nucleobase modifying polypeptide (e.g., one or more deaminases) and a polynucleotide programmable nucleotide binding domain in conjunction with a guide polynucleotide (e.g., guide RNA). In various embodiments, the agent is a biomolecular complex comprising a protein domain having base editing activity, i.e., a domain capable of modifying a base (e.g., A, T, C, G, or U) within a nucleic acid molecule (e.g., DNA). In some embodiments, the polynucleotide programmable DNA binding domain is fused or linked to one or more deaminase domains. In one embodiment, the agent is a fusion protein comprising one or more domains having base editing activity. In another embodiment, the protein domains having base editing activity are linked to the guide RNA (e.g., via an RNA binding motif on the guide RNA and an RNA binding domain fused to the deaminase). In some embodiments, the domains having base editing activity are capable of deaminating a base within a nucleic acid molecule. In some embodiments, the base editor is capable of deaminating one or more bases within a DNA molecule. In some embodiments, the base editor is capable of deaminating a cytosine (C) or an adenosine (A) within DNA. In some embodiments, the base editor is capable of deaminating a cytosine (C) and an adenosine (A) within DNA. In some embodiments, the base editor is a cytidine base editor (CBE). In some embodiments, the base editor is an adenosine base editor (ABE). In some embodiments, the base editor is an adenosine base editor (ABE) and a cytidine base editor (CBE). In some embodiments, the base editor is a fusion protein comprising an adenosine deaminase and a cytidine deaminase. In some embodiments, the base editor is a Cas9 protein fused to an adenosine deaminase and/or a cytidine deaminase. In some embodiments, the base editor is a Cas9 nickase (nCas9) fused to a cytidine deaminase and an adenosine deaminase. In some embodiments, the base editor is a nuclease-inactive Cas9 (dCas9) fused to an adenosine deaminase. In some embodiments, the Cas9 is a circular permutant Cas9 (e.g., spCas9 or saCas9). Circular permutant Cas9s are known in the art and described, for example, in Oakes et al., Cell 176, 254-267, 2019. In some embodiments, the base editor is fused to an inhibitor of base excision repair, for example, a UGI domain, or a dISN domain. In some embodiments, the fusion protein comprises a Cas9 nickase fused to a deaminase and an inhibitor of base excision repair, such as a UGI or dISN domain. In other embodiments the base editor is an abasic base editor.

[0040] In some embodiments, an adenosine deaminase is evolved from TadA. In some embodiments, the polynucleotide programmable DNA binding domain is a CRISPR associated (e.g., Cas or Cpf1) enzyme. In some embodiments, the base editor is a catalytically dead Cas9 (dCas9) fused to a deaminase domain. In some embodiments, the base editor is a Cas9 nickase (nCas9) fused to a deaminase domain. In some embodiments, the base editor is fused to an inhibitor of base excision repair (BER). In some embodiments, the inhibitor of base excision repair is a uracil DNA glycosylase inhibitor (UGI). In some embodiments, the inhibitor of base excision repair is an inosine base excision repair inhibitor. Details of base editors are described in International PCT Application Nos. PCT/2017/045381 (WO2018/027078) and PCT/US2016/058344 (WO2017/070632), each of which is incorporated herein by reference for its entirety. Also see Komor, A. C., et al., “Programmable editing of a target base in genomic DNA without double-stranded DNA cleavage” Nature 533, 420-424 (2016); Gaudelli, N. M., et al., “Programmable base editing of A•T to G•C in genomic DNA without DNA cleavage” Nature 551, 464-471 (2017); Komor, A. C., et al., “Improved base excision repair inhibition and bacteriophage Mu Gam protein yields C:G-to-T:A base editors with higher efficiency and product purity” Science Advances 3:eaao4774 (2017), and Rees, H. A., et al., “Base editing: precision chemistry on the genome and transcriptome of living cells.” Nat Rev Genet. 2018 December; 19(12):770-788. doi: 10.1038/s41576-018-0059-1, the entire contents of which are hereby incorporated by reference.

[0041] By way of example, a cytidine base editor (CBE) as used in the base editing compositions, systems and methods described herein has the following nucleic acid sequence (8877 base pairs), (Addgene, Watertown, Mass.; Komor A C, et al., 2017, Sci Adv., 30; 3(8):eaao4774. doi: 10.1126/sciadv.aao4774) as provided below. Polynucleotide sequences having at least 95% or greater identity to the BE4 nucleic acid sequence are also encompassed.

```
      1 ATATGCCAAG TACGCCCCCT ATTGACGTCA ATGACGGTAA ATGGCCCGCC TGGCATTATG
    61 CCCAGTACAT GACCTTATGG GACTTTCCTA CTTGGCAGTA CATCTACGTA TTAGTCATCG
  121 CTATTACCAT GGTGATGCGG TTTTGGCAGT ACATCAATGG GCGTGGATAG CGGTTTGACT
  181 CACGGGGATT TCCAAGTCTC CACCCCATTG ACGTCAATGG GAGTTTGTTT TGGCACCAAA
  241 ATCAACGGGA CTTTCCAAAA TGTCGTAACA ACTCCGCCCC ATTGACGCAA ATGGGCGGTA
  301 GGCGTGTACG GTGGGAGGTC TATATAAGCA GAGCTGGTTT AGTGAACCGT CAGATCCGCT
  361 AGAGATCCGC GGCCGCTAAT ACGACTCACT ATAGGGAGAG CCGCCACCAT GAGCTCAGAG
  421 ACTGGCCCAG TGGCTGTGGA CCCCACATTG AGACGGCGGA TCGAGCCCCA TGAGTTTGAG
  481 GTATTCTTCG ATCCGAGAGA GCTCCGCAAG GAGACCTGCC TGCTTTACGA AATTAATTGG
  541 GGGGGCCGGC ACTCCATTTG GCGACATACA TCACAGAACA CTAACAAGCA CGTCGAAGTC
  601 AACTTCATCG AGAAGTTCAC GACAGAAAGA TATTTCTGTC CGAACACAAG GTGCAGCATT
  661 ACCTGGTTTC TCAGCTGGAG CCCATGCGGC GAATGTAGTA GGGCCATCAC TGAATTCCTG
  721 TCAAGGTATC CCCACGTCAC TCTGTTTATT TACATCGCAA GGCTGTACCA CCACGCTGAC
  781 CCCCGCAATC GACAAGGCCT GCGGGATTTG ATCTCTTCAG GTGTGACTAT CCAAATTATG
  841 ACTGAGCAGG AGTCAGGATA CTGCTGGAGA AACTTTGTGA ATTATAGCCC GAGTAATGAA
  901 GCCCACTGGC CTAGGTATCC CCATCTGTGG GTACGACTGT ACGTTCTTGA ACTGTACTGC
  961 ATCATACTGG GCCTGCCTCC TTGTCTCAAC ATTCTGAGAA GGAAGCAGCC ACAGCTGACA
1021 TTCTTTACCA TCGCTCTTCA GTCTTGTCAT TACCAGCGAC TGCCCCCACA CATTCTCTGG
1081 GCCACCGGGT TGAAATCTGG TGGTTCTTCT GGTGGTTCTA GCGGCAGCGA GACTCCCGGG
1141 ACCTCAGAGT CCGCCACACC CGAAAGTTCT GGTGGTTCTT CTGGTGGTTC TGATAAAAAG
1201 TATTCTATTG GTTTAGCCAT CGGCACTAAT TCCGTTGGAT GGGCTGTCAT AACCGATGAA
1261 TACAAAGTAC CTTCAAAGAA ATTTAAGGTG TTGGGGAACA CAGACCGTCA TTCGATTAAA
1321 AAGAATCTTA TCGGTGCCCT CCTATTCGAT AGTGGCGAAA CGGCAGAGGC GACTCGCCTG
1381 AAACGAACCG CTCGGAGAAG GTATACACGT CGCAAGAACC GAATATGTTA CTTACAAGAA
1441 ATTTTTAGCA ATGAGATGGC CAAAGTTGAC GATTCTTTCT TTCACCGTTT GGAAGAGTCC
1501 TTCCTTGTCG AAGAGGACAA GAAACATGAA CGGCACCCCA TCTTTGGAAA CATAGTAGAT
1561 GAGGTGGCAT ATCATGAAAA GTACCCAACG ATTTATCACC TCAGAAAAAA GCTAGTTGAC
1621 TCAACTGATA AAGCGGACCT GAGGTTAATC TACTTGGCTC TTGCCCATAT GATAAAGTTC
1681 CGTGGGCACT TTCTCATTGA GGGTGATCTA AATCCGGACA ACTCGGATGT CGACAAACTG
1741 TTCATCCAGT TAGTACAAAC CTATAATCAG TTGTTTGAAG AGAACCCTAT AAATGCAAGT
1801 GGCGTGGATG CGAAGGCTAT TCTTAGCGCC CGCCTCTCTA AATCCCGACG GCTAGAAAAC
1861 CTGATCGCAC AATTACCCGG AGAGAAGAAA AATGGGTTGT TCGGTAACCT TATAGCGCTC
1921 TCACTAGGCC TGACACCAAA TTTTAAGTCG AACTTCGACT TAGCTGAAGA TGCCAAATTG
1981 CAGCTTAGTA AGGACACGTA CGATGACGAT CTCGACAATC TACTGGCACA AATTGGAGAT
2041 CAGTATGCGG ACTTATTTTT GGCTGCCAAA AACCTTAGCG ATGCAATCCT CCTATCTGAC
2101 ATACTGAGAG TTAATACTGA GATTACCAAG GCGCCGTTAT CCGCTTCAAT GATCAAAAGG
2161 TACGATGAAC ATCACCAAGA CTTGACACTT CTCAAGGCCC TAGTCCGTCA GCAACTGCCT
2221 GAGAAATATA AGGAAATATT CTTTGATCAG TCGAAAAACG GGTACGCAGG TTATATTGAC
2281 GGCGGAGCGA GTCAAGAGGA ATTCTACAAG TTTATCAAAC CCATATTAGA GAAGATGGAT
2341 GGGACGGAAG AGTTGCTTGT AAAACTCAAT CGCGAAGATC TACTGCGAAA GCAGCGGACT
2401 TTCGACAACG GTAGCATTCC ACATCAAATC CACTTAGGCG AATTGCATGC TATACTTAGA
2461 AGGCAGGAGG ATTTTTATCC GTTCCTCAAA GACAATCGTG AAAAGATTGA GAAAATCCTA
2521 ACCTTTCGCA TACCTTACTA TGTGGGACCC CTGGCCCGAG GGAACTCTCG GTTCGCATGG
2581 ATGACAAGAA AGTCCGAAGA AACGATTACT CCATGGAATT TTGAGGAAGT TGTCGATAAA
2641 GGTGCGTCAG CTCAATCGTT CATCGAGAGG ATGACCAACT TTGACAAGAA TTTACCGAAC
2701 GAAAAAGTAT TGCCTAAGCA CAGTTTACTT TACGAGTATT TCACAGTGTA CAATGAACTC
2761 ACGAAAGTTA AGTATGTCAC TGAGGGCATG CGTAAACCCG CCTTTCTAAG CGGAGAACAG
2821 AAGAAAGCAA TAGTAGATCT GTTATTCAAG ACCAACCGCA AAGTGACAGT TAAGCAATTG
2881 AAAGAGGACT ACTTTAAGAA AATTGAATGC TTCGATTCTG TCGAGATCTC CGGGGTAGAA
2941 GATCGATTTA ATGCGTCACT TGGTACGTAT CATGACCTCC TAAAGATAAT TAAAGATAAG
3001 GACTTCCTGG ATAACGAAGA GAATGAAGAT ATCTTAGAAG ATATAGTGTT GACTCTTACC
3061 CTCTTTGAAG ATCGGGAAAT GATTGAGGAA AGACTAAAAA CATACGCTCA CCTGTTCGAC
3121 GATAAGGTTA TGAAACAGTT AAAGAGGCGT CGCTATACGG GCTGGGGACG ATTGTCGCGG
3181 AAACTTATCA ACGGGATAAG AGACAAGCAA AGTGGTAAAA CTATTCTCGA TTTTCTAAAG
3241 AGCGACGGCT TCGCCAATAG GAACTTTATG CAGCTGATCC ATGATGACTC TTTAACCTTC
3301 AAAGAGGATA TACAAAAGGC ACAGGTTTCC GGACAAGGGG ACTCATTGCA CGAACATATT
3361 GCGAATCTTG CTGGTTCGCC AGCCATCAAA AAGGGCATAC TCCAGACAGT CAAAGTAGTG
3421 GATGAGCTAG TTAAGGTCAT GGGACGTCAC AAACCGGAAA ACATTGTAAT CGAGATGGCA
3481 CGCGAAAATC AAACGACTCA GAAGGGGCAA AAAAACAGTC GAGAGCGGAT GAAGAGAATA
3541 GAAGAGGGTA TTAAAGAACT GGGCAGCCAG ATCTTAAAGG AGCATCCTGT GGAAAATACC
3601 CAATTGCAGA ACGAGAAACT TTACCTCTAT TACCTACAAA ATGGAAGGGA CATGTATGTT
3661 GATCAGGAAC TGGACATAAA CCGTTTATCT GATTACGACG TCGATCACAT TGTACCCCAA
3721 TCCTTTTTGA AGGACGATTC AATCGACAAT AAAGTGCTTA CACGCTCGGA TAAGAACCGA
3781 GGGAAAAGTG ACAATGTTCC AAGCGAGGAA GTCGTAAAGA AAATGAAGAA CTATTGGCGG
3841 CAGCTCCTAA ATGCGAAACT GATAACGCAA AGAAAGTTCG ATAACTTAAC TAAAGCTGAG
3901 AGGGGTGGCT TGTCTGAACT TGACAAGGCC GGATTTATTA AACGTCAGCT CGTGGAAACC
3961 CGCCAAATCA CAAAGCATGT TGCACAGATA CTAGATTCCC GAATGAATAC GAAATACGAC
4021 GAGAACGATA AGCTGATTCG GGAAGTCAAA GTAATCACTT TAAAGTCAAA ATTGGTGTCG
4081 GACTTCAGAA AGGATTTTCA ATTCTATAAA GTTAGGGAGA TAAATAACTA CCACCATGCG
4141 CACGACGCTT ATCTTAATGC CGTCGTAGGG ACCGCACTCA TTAAGAAATA CCCGAAGCTA
4201 GAAAGTGAGT TTGTGTATGG TGATTACAAA GTTTATGACG TCCGTAAGAT GATCGCGAAA
4261 AGCGAACAGG AGATAGGCAA GGCTACAGCC AAATACTTCT TTTATTCTAA CATTATGAAT
4321 TTCTTTAAGA CGGAAATCAC TCTGGCAAAC GGAGAGATAC GCAAACGACC TTTAATTGAA
4381 ACCAATGGGG AGACAGGTGA AATCGTATGG GATAAGGGCC GGGACTTCGC GACGGTGAGA
4441 AAAGTTTTGT CCATGCCCCA AGTCAACATA GTAAAGAAAA CTGAGGTGCA GACCGGAGGG
4501 TTTTCAAAGG AATCGATTCT TCCAAAAAGG AATAGTGATA AGCTCATCGC TCGTAAAAAG
4561 GACTGGGACC CGAAAAAGTA CGGTGGCTTC GATAGCCCTA CAGTTGCCTA TTCTGTCCTA
4621 GTAGTGGCAA AAGTTGAGAA GGGAAAATCC AAGAAACTGA AGTCAGTCAA AGAATTATTG
4681 GGGATAACGA TTATGGAGCG CTCGTCTTTT GAAAAGAACC CCATCGACTT CCTTGAGGCG
4741 AAAGGTTACA AGGAAGTAAA AAAGGATCTC ATAATTAAAC TACCAAAGTA TAGTCTGTTT
4801 GAGTTAGAAA ATGGCCGAAA ACGGATGTTG GCTAGCGCCG GAGAGCTTCA AAAGGGGAAC
4861 GAACTCGCAC TACCGTCTAA ATACGTGAAT TTCCTGTATT TAGCGTCCCA TTACGAGAAG
4921 TTGAAAGGTT CACCTGAAGA TAACGAACAG AAGCAACTTT TTGTTGAGCA GCACAAACAT
4981 TATCTCGACG AAATCATAGA GCAAATTTCG GAATTCAGTA AGAGAGTCAT CCTAGCTGAT
5041 GCCAATCTGG ACAAAGTATT AAGCGCATAC AACAAGCACA GGGATAAACC CATACGTGAG
5101 CAGGCGGAAA ATATTATCCA TTTGTTTACT CTTACCAACC TCGGCGCTCC AGCCGCATTC
5161 AAGTATTTTG ACACAACGAT AGATCGCAAA CGATACACTT CTACCAAGGA GGTGCTAGAC
5221 GCGACACTGA TTCACCAATC CATCACGGGA TTATATGAAA CTCGGATAGA TTTGTCACAG
5281 CTTGGGGGTG ACTCTGGTGG TTCTGGAGGA TCTGGTGGTT CTACTAATCT GTCAGATATT
5341 ATTGAAAAGG AGACCGGTAA GCAACTGGTT ATCCAGGAAT CCATCCTCAT GCTCCCAGAG
5401 GAGGTGGAAG AAGTCATTGG GAACAAGCCG GAAAGCGATA TACTCGTGCA CACCGCCTAC
5461 GACGAGAGCA CCGACGAGAA TGTCATGCTT CTGACTAGCG ACGCCCCTGA ATACAAGCCT
5521 TGGGCTCTGG TCATACAGGA TAGCAACGGT GAGAACAAGA TTAAGATGCT CTCTGGTGGT
5581 TCTGGAGGAT CTGGTGGTTC TACTAATCTG TCAGATATTA TTGAAAAGGA GACCGGTAAG
5641 CAACTGGTTA TCCAGGAATC CATCCTCATG CTCCCAGAGG AGGTGGAAGA AGTCATTGGG
5701 AACAAGCCGG AAAGCGATAT ACTCGTGCAC ACCGCCTACG ACGAGAGCAC CGACGAGAAT
5761 GTCATGCTTC TGACTAGCGA CGCCCCTGAA TACAAGCCTT GGGCTCTGGT CATACAGGAT
5821 AGCAACGGTG AGAACAAGAT TAAGATGCTC TCTGGTGGTT CTCCCAAGAA GAAGAGGAAA
5881 GTCTAACCGG TCATCATCAC CATCACCATT GAGTTTAAAC CCGCTGATCA GCCTCGACTG
5941 TGCCTTCTAG TTGCCAGCCA TCTGTTGTTT GCCCCTCCCC CGTGCCTTCC TTGACCCTGG
6001 AAGGTGCCAC TCCCACTGTC CTTTCCTAAT AAAATGAGGA AATTGCATCG CATTGTCTGA
6061 GTAGGTGTCA TTCTATTCTG GGGGGTGGGG TGGGGCAGGA CAGCAAGGGG GAGGATTGGG
6121 AAGACAATAG CAGGCATGCT GGGGATGCGG TGGGCTCTAT GGCTTCTGAG GCGGAAAGAA
6181 CCAGCTGGGG CTCGATACCG TCGACCTCTA GCTAGAGCTT GGCGTAATCA TGGTCATAGC
6241 TGTTTCCTGT GTGAAATTGT TATCCGCTCA CAATTCCACA CAACATACGA GCCGGAAGCA
6301 TAAAGTGTAA AGCCTAGGGT GCCTAATGAG TGAGCTAACT CACATTAATT GCGTTGCGCT
6361 CACTGCCCGC TTTCCAGTCG GGAAACCTGT CGTGCCAGCT GCATTAATGA ATCGGCCAAC
6421 GCGCGGGGAG AGGCGGTTTG CGTATTGGGC GCTCTTCCGC TTCCTCGCTC ACTGACTCGC
6481 TGCGCTCGGT CGTTCGGCTG CGGCGAGCGG TATCAGCTCA CTCAAAGGCG GTAATACGGT
6541 TATCCACAGA ATCAGGGGAT AACGCAGGAA AGAACATGTG AGCAAAAGGC CAGCAAAAGG
6601 CCAGGAACCG TAAAAAGGCC GCGTTGCTGG CGTTTTTCCA TAGGCTCCGC CCCCCTGACG
6661 AGCATCACAA AAATCGACGC TCAAGTCAGA GGTGGCGAAA CCCGACAGGA CTATAAAGAT
6721 ACCAGGCGTT TCCCCCTGGA AGCTCCCTCG TGCGCTCTCC TGTTCCGACC CTGCCGCTTA
6781 CCGGATACCT GTCCGCCTTT CTCCCTTCGG GAAGCGTGGC GCTTTCTCAT AGCTCACGCT
6841 GTAGGTATCT CAGTTCGGTG TAGGTCGTTC GCTCCAAGCT GGGCTGTGTG CACGAACCCC
6901 CCGTTCAGCC CGACCGCTGC GCCTTATCCG GTAACTATCG TCTTGAGTCC AACCCGGTAA
6961 GACACGACTT ATCGCCACTG GCAGCAGCCA CTGGTAACAG GATTAGCAGA GCGAGGTATG
7021 TAGGCGGTGC TACAGAGTTC TTGAAGTGGT GGCCTAACTA CGGCTACACT AGAAGAACAG
7081 TATTTGGTAT CTGCGCTCTG CTGAAGCCAG TTACCTTCGG AAAAAGAGTT GGTAGCTCTT
7141 GATCCGGCAA ACAAACCACC GCTGGTAGCG GTGGTTTTTT TGTTTGCAAG CAGCAGATTA
7201 CGCGCAGAAA AAAAGGATCT CAAGAAGATC CTTTGATCTT TTCTACGGGG TCTGACGCTC
7261 AGTGGAACGA AAACTCACGT TAAGGGATTT TGGTCATGAG ATTATCAAAA AGGATCTTCA
7321 CCTAGATCCT TTTAAATTAA AAATGAAGTT TTAAATCAAT CTAAAGTATA TATGAGTAAA
7381 CTTGGTCTGA CAGTTACCAA TGCTTAATCA GTGAGGCACC TATCTCAGCG ATCTGTCTAT
7441 TTCGTTCATC CATAGTTGCC TGACTCCCCG TCGTGTAGAT AACTACGATA CGGGAGGGCT
7501 TACCATCTGG CCCCAGTGCT GCAATGATAC CGCGAGACCC ACGCTCACCG GCTCCAGATT
7561 TATCAGCAAT AAACCAGCCA GCCGGAAGGG CCGAGCGCAG AAGTGGTCCT GCAACTTTAT
7621 CCGCCTCCAT CCAGTCTATT AATTGTTGCC GGGAAGCTAG AGTAAGTAGT TCGCCAGTTA
7681 ATAGTTTGCG CAACGTTGTT GCCATTGCTA CAGGCATCGT GGTGTCACGC TCGTCGTTTG
7741 GTATGGCTTC ATTCAGCTCC GGTTCCCAAC GATCAAGGCG AGTTACATGA TCCCCCATGT
7801 TGTGCAAAAA AGCGGTTAGC TCCTTCGGTC CTCCGATCGT TGTCAGAAGT AAGTTGGCCG
7861 CAGTGTTATC ACTCATGGTT ATGGCAGCAC TGCATAATTC TCTTACTGTC ATGCCATCCG
7921 TAAGATGCTT TTCTGTGACT GGTGAGTACT CAACCAAGTC ATTCTGAGAA TAGTGTATGC
7981 GGCGACCGAG TTGCTCTTGC CCGGCGTCAA TACGGGATAA TACCGCGCCA CATAGCAGAA
8041 CTTTAAAAGT GCTCATCATT GGAAAACGTT CTTCGGGGCG AAAACTCTCA AGGATCTTAC
8101 CGCTGTTGAG ATCCAGTTCG ATGTAACCCA CTCGTGCACC CAACTGATCT TCAGCATCTT
8161 TTACTTTCAC CAGCGTTTCT GGGTGAGCAA AAACAGGAAG GCAAAATGCC GCAAAAAAGG
8221 GAATAAGGGC GACACGGAAA TGTTGAATAC TCATACTCTT CCTTTTTCAA TATTATTGAA
8281 GCATTTATCA GGGTTATTGT CTCATGAGCG GATACATATT TGAATGTATT TAGAAAAATA
8341 AACAAATAGG GGTTCCGCGC ACATTTCCCC GAAAAGTGCC ACCTGACGTC GACGGATCGG
8401 GAGATCGATC TCCCGATCCC CTAGGGTCGA CTCTCAGTAC AATCTGCTCT GATGCCGCAT
8461 AGTTAAGCCA GTATCTGCTC CCTGCTTGTG TGTTGGAGGT CGCTGAGTAG TGCGCGAGCA
8521 AAATTTAAGC TACAACAAGG CAAGGCTTGA CCGACAATTG CATGAAGAAT CTGCTTAGGG
8581 TTAGGCGTTT TGCGCTGCTT CGCGATGTAC GGGCCAGATA TACGCGTTGA CATTGATTAT
8641 TGACTAGTTA TTAATAGTAA TCAATTACGG GGTCATTAGT TCATAGCCCA TATATGGAGT
8701 TCCGCGTTAC ATAACTTACG GTAAATGGCC CGCCTGGCTG ACCGCCCAAC GACCCCCGCC
8761 CATTGACGTC AATAATGACG TATGTTCCCA TAGTAACGCC AATAGGGACT TTCCATTGAC
8821 GTCAATGGGT GGAGTATTTA CGGTAAACTG CCCACTTGGC AGTACATCAA GTGTATC
```

[0042] In some embodiments, the cytidine base editor is BE4 having a nucleic acid sequence selected from one of the following:

[0043] Original BE4 nucleic acid sequence:

ATGagctcagagactggcccagtggctgtggaccccacattgagacggcggatcgagccccatgagtt
tgaggtattcttcgatccgagagagctccgcaaggagacctgcctgctttacgaaattaattgggggg
gccggcactccatttggcgacatacatcacagaacactaacaagcacgtcgaagtcaacttcatcgag
aagttcacgacagaaagatatttctgtccgaacacaaggtgcagcattacctggtttctcagctggag
ccgcgaatgtagtagggccatcactgaattcctgtcaaggtatccccacgtcactctgtttatttaca
tcgcaaggctgtaccaccacgctgacccccgcaatcgacaaggcctgcgggatttgatctcttcaggt
gtgactatccaaattatgactgagcaggagtcaggatactgctggagaaactttgtgaattatagccc
gagtaatgaagcccactggcctaggtatccccatctgtgggtacgactgtacgttcttgaactgtact
gcatcatactgggcctgcctccttgtctcaacattctgagaaggaagcagccacagctgacattcttt
accatcgctcttcagtcttgtcattaccagcgactgcccccacacattctctgggccaccgggttgaa
atctggtggttcttctggtggttctagcggcagcgagactcccgggacctcagagtccgccacacccg
aaagttctggtggttcttctggtggttctgataaaaagtattctattggtttagccatcggcactaat
tccgttggatgggctgtcataaccgatgaatacaaagtaccttcaaagaaatttaaggtgttggggaa
cacagaccgtcattcgattaaaaagaatcttatcggtgccctcctattcgatagtggcgaaacggcag
aggcgactcgcctgaaacgaaccgctcggagaaggtatacacgtcgcaagaaccgaatatgttactta
caagaaatttttagcaatgagatggccaaagttgacgattctttctttcaccgtttggaagagtcctt
ccttgtcgaagaggacaagaaacatgaacggcaccccatctttggaaacatagtagatgaggtggcat
atcatgaaaagtacccaacgatttatcacctcagaaaaaagctagttgactcaactgataaagcggac
ctgaggttaatctacttggctcttgcccatatgataaagttccgtgggcactttctcattgagggtga
tctaaatccggacaactcggatgtcgacaaactgttcatccagttagtacaaacctataatcagttgt
ttgaagagaaccctataaatgcaagtggcgtggatgcgaaggctattcttagcgcccgcctctctaaa
tcccgacggctagaaaacctgatcgcacaattacccggagagaagaaaaatgggttgttcggtaacct
tatagcgctctcactaggcctgacaccaaattttaagtcgaacttcgacttagctgaagatgccaaat
tgcagcttagtaaggacacgtacgatgacgatctcgacaatctactggcacaaattggagatcagtat
gcggacttatttttggctgccaaaaaccttagcgatgcaatcctcctatctgacatactgagagttaa
tactgagattaccaaggcgccgttatccgcttcaatgatcaaaaggtacgatgaacatcaccaagact
tgacacttctcaaggccctagtccgtcagcaactgcctgagaaatataaggaaatattctttgatcag
tcgaaaaacgggtacgcaggttatattgacggcggagcgagtcaagaggaattctacaagtttatcaa
acccatattagagaagatggatgggacggaagagttgcttgtaaaactcaatcgcgaagatctactgc
gaaagcagcggactttcgacaacggtagcattccacatcaaatccacttaggcgaattgcatgctata
cttagaaggcaggaggatttttatccgttcctcaaagacaatcgtgaaaagattgagaaaatcctaac
ctttcgcataccttactatgtgggacccctggcccgagggaactctcggttcgcatggatgacaagaa
agtccgaagaaacgattactccatggaattttgaggaagttgtcgataaaggtgcgtcagctcaatcg
ttcatcgagaggatgaccaactttgacaagaatttaccgaacgaaaaagtattgcctaagcacagttt
actttacgagtatttcacagtgtacaatgaactcacgaaagttaagtatgtcactgagggcatgcgta
aacccgcctttctaagcggagaacagaagaaagcaatagtagatctgttattcaagaccaaccgcaaa
gtgacagttaagcaattgaaagaggactactttaagaaaattgaatgcttcgattctgtcgagatctc
cggggtagaagatcgatttaatgcgtcacttggtacgtatcatgacctcctaaagataattaaagata
aggacttcctggataacgaagagaatgaagatatcttagaagatatagtgttgactcttaccctcttt
gaagatcgggaaatgattgaggaaagactaaaaacatacgctcacctgttcgacgataaggttatgaa
acagttaaagaggcgtcgctatacgggctggggacgattgtcgcggaaacttatcaacgggataagag
acaagcaaagtggtaaaactattctcgattttctaaagagcgacggcttcgccaataggaactttatg
cagctgatccatgatgactctttaaccttcaaagaggatatacaaaaggcacaggtttccggacaagg
ggactcattgcacgaacatattgcgaatcttgctggttcgccagccatcaaaaagggcatactccaga
cagtcaaagtagtggatgagctagttaaggtcatgggacgtcacaaaccggaaaacattgtaatcgag
atggcacgcgaaaatcaaacgactcagaaggggcaaaaaaacagtcgagagcggatgaagagaataga
agagggtattaaagaactgggcagccagatcttaaaggagcatcctgtggaaaatacccaattgcaga
acgagaaactttacctctattacctacaaaatggaagggacatgtatgttgatcaggaactggacata
aaccgtttatctgattacgacgtcgatcacattgtaccccaatcctttttgaaggacgattcaatcga
caataaagtgcttacacgctcggataagaaccgagggaaaagtgacaatgttccaagcgaggaagtcg
taaagaaaatgaagaactattggcggcagctcctaaatgcgaaactgataacgcaaagaaagttcgat
aacttaactaaagctgagaggggtggcttgtctgaacttgacaaggccggatttattaaacgtcagct
cgtggaaacccgccaaatcacaaagcatgttgcacagatactagattcccgaatgaatacgaaatacg
acgagaacgataagctgattcgggaagtcaaagtaatcactttaaagtcaaaattggtgtcggacttc
agaaaggattttcaattctataaagttagggagataaataactaccaccatgcgcacgacgcttatct
taatgccgtcgtagggaccgcactcattaagaaatacccgaagctagaaagtgagtttgtgtatggtg
attacaaagtttatgacgtccgtaagatgatcgcgaaaagcgaacaggagataggcaaggctacagcc
aaatacttcttttattctaacattatgaatttctttaagacggaaatcactctggcaaacggagagat
acgcaaacgacctttaattgaaaccaatggggagacaggtgaaatcgtatgggataagggccgggact
tcgcgacggtgagaaaagttttgtccatgccccaagtcaacatagtaaagaaaactgaggtgcagacc
ggagggttttcaaaggaatcgattcttccaaaaaggaatagtgataagctcatcgctcgtaaaaagga
ctgggacccgaaaaagtacggtggcttcgatagccctacagttgcctattctgtcctagtagtggcaa
aagttgagaagggaaaatccaagaaactgaagtcagtcaaagaattattggggataacgattatggag
cgctcgtcttttgaaaagaaccccatcgacttccttgaggcgaaaggttacaaggaagtaaaaaagga
tctcataattaaactaccaaagtatagtctgtttgagttagaaaatggccgaaaacggatgttggcta
gcgccggagagcttcaaaaggggaacgaactcgcactaccgtctaaatacgtgaatttcctgtattta
gcgtcccattacgagaagttgaaaggttcacctgaagataacgaacagaagcaactttttgttgagca
gcacaaacattatctcgacgaaatcatagagcaaatttcggaattcagtaagagagtcatcctagctg
atgccaatctggacaaagtattaagcgcatacaacaagcacagggataaacccatacgtgagcaggcg
gaaaatattatccatttgtttactcttaccaacctcggcgctccagccgcattcaagtattttgacac
aacgatagatcgcaaacgatacacttctaccaaggaggtgctagacgcgacactgattcaccaatcca
tcacgggattatatgaaactcggatagatttgtcacagcttgggggtgactctggtggttctggagga
tctggtggttctactaatctgtcagatattattgaaaaggagaccggtaagcaactggttatccagga
atccatcctcatgctcccagaggaggtggaagaagtcattgggaacaagccggaaagcgatatactcg
tgcacaccgcctacgacgagagcaccgacgagaatgtcatgcttctgactagcgacgcccctgaatac
aagccttgggctctggtcatacaggatagcaacggtgagaacaagattaagatgctctctggtggttc
tggaggatctggtggttctactaatctgtcagatattattgaaaaggagaccggtaagcaactggtta
tccaggaatccatcctcatgctcccagaggaggtggaagaagtcattgggaacaagccggaaagcgat
atactcgtgcacaccgcctacgacgagagcaccgacgagaatgtcatgcttctgactagcgacgcccc
tgaatacaagccttgggctctggtcatacaggatagcaacggtgagaacaagattaagatgctctctg
gtggttctAAAAGGACGGCGGACGGATCAGAGTTCGAGAGTCCGCGAAAGGTCGAAtaa

[0044] BE4 Codon Optimization 1 nucleic acid sequence:

ATGTCATCCGAAACCGGGCCAGTGGCCGTAGACCCAACACTCAGGAGGCGGATAGAACCCCATGAGTT
TGAAGTGTTCTTCGACCCCAGAGAGCTGCGCAAAGAGACTTGCCTCCTGTATGAAATAAATTGGGGGG
GTCGCCATTCAATTTGGAGGCACACTAGCCAGAATACTAACAAACACGTGGAGGTAAATTTTATCGAG
AAGTTTACCACCGAAAGATACTTTTGCCCCAATACACGGTGTTCAATTACCTGGTTTCTGTCATGGAG
TCCATGTGGAGAATGTAGTAGAGCGATAACTGAGTTCCTGTCTCGATATCCTCACGTCACGTTGTTTA
TATACATCGCTCGGCTTTATCACCATGCGGACCCGCGGAACAGGCAAGGTCTTCGGGACCTCATATCC
TCTGGGGTGACCATCCAGATAATGACGGAGCAAGAGAGCGGATACTGCTGGCGAAACTTTGTTAACTA
CAGCCCAAGCAATGAGGCACACTGGCCTAGATATCCGCATCTCTGGGTTCGACTGTATGTCCTTGAAC
TGTACTGCATAATTCTGGGACTTCCGCCATGCTTGAACATTCTGCGGCGGAAACAACCACAGCTGACC
TTTTTCACGATTGCTCTCCAAAGTTGTCACTACCAGCGATTGCCACCCCACATCTTGTGGGCTACTGG
ACTCAAGTCTGGAGGAAGTTCAGGCGGAAGCAGCGGGTCTGAAACGCCCGGAACCTCAGAGAGCGCAA
CGCCCGAAAGCTCTGGAGGGTCAAGTGGTGGTAGTGATAAGAAATACTCCATCGGCCTCGCCATCGGT
ACGAATTCTGTCGGTTGGGCCGTTATCACCGATGAGTACAAGGTCCCTTCTAAGAAATTCAAGGTTTT
GGGCATACAGACCGCCATTCTATAAAAAAAAAACCTGATCGGCGCCCTTTTGTTTGACAGTGGTGAGA
CTGCTGAAGCGACTCGCCTGAAGCGAACTGCCAGGAGGCGGTATACGAGGCGAAAAAACCGAATTTGT
TACCTCCAGGAGATTTTCTCAAATGAAATGGCCAAGGTAGATGATAGTTTTTTTCACCGCTTGGAAGA
AAGTTTTCTCGTTGAGGAGGACAAAAAGCACGAGAGGCACCCAATCTTTGGCAACATAGTCGATGAGG
TCGCATACCATGAGAAATATCCTACGATCTATCATCTCCGCAAGAAGCTGGTCGATAGCACGGATAAA
GCTGACCTCCGGCTGATCTACCTTGCTCTTGCTCACATGATTAAATTCAGGGGCCATTTCCTGATAGA
AGGAGACCTCAATCCCGACAATTCTGATGTCGACAAACTGTTTATTCAGCTCGTTCAGACCTATAATC
AACTCTTTGAGGAGAACCCCATCAATGCTTCAGGGGTGGACGCAAAGGCCATTTTGTCCGCGCGCTTG
AGTAAATCACGACGCCTCGAGAATTTGATAGCTCAACTGCCGGGTGAGAAGAAAAACGGGTTGTTTGG
GAATCTCATAGCGTTGAGTTTGGGACTTACGCCAAACTTTAAGTCTAACTTTGATTTGGCCGAAGATG
CCAAATTGCAGCTGTCCAAAGATACCTATGATGACGACTTGGATAACCTTCTTGCGCAGATTGGTGAC
CAPTACGCGGATCTGTTICTTGCCGCAAPAPTCTGTCCGACGCCATACTCTTGTCCGATATACTGCG
CGTCAATACTGAGATAACTAAGGCTCCCCTCAGCGCGTCCATGATTAAAAGATACGATGAGCACCACC
AAGATCTCACTCTGTTGAAAGCCCTGGTTCGCCAGCAGCTTCCAGAGAAGTATAAGGAGATATTTTTC
GACCAATCTAAAAACGGCTATGCGGGTTACATTGACGGTGGCGCCTCTCAAGAAGAATTCTACAAGTT
TATAAAGCCGATACTTGAGAAAATGGACGGTACAGAGGAATTGTTGGTTAAGCTCAATCGCGAGGACT
TGTTGAGAAAGCAGCGCACATTTGACAATGGTAGTATTCCACACCAGATTCATCTGGGCGAGTTGCAT
GCCATTCTTAGAAGACAAGAAGATTTTTATCCGTTTCTGAAAGATAACAGAGAAAAGATTGAAAAGAT
ACTTACCTTTCGCATACCGTATTATGTAGGTCCCCTGGCTAGAGGGAACAGTCGCTTCGCTTGGATGA
CTCGAAAATCAGAAGAAACAATAACCCCCTGGAATTTTGAAGAAGTGGTAGATAAAGGTGCGAGTGCC
CAATCTTTTATTGAGCGGATGACAAATTTTGACAAGAATCTGCCTAACGAAAAGGTGCTTCCCAAGCA
TTCCCTTTTGTATGAATACTTTACAGTATATAATGAACTGACTAAAGTGAAGTACGTTACCGAGGGGA
TGCGAAAGCCAGCTTTTCTCAGTGGCGAGCAGAAAAAAGCAATAGTTGACCTGCTGTTCAAGACGAAT
AGGAAGGTTACCGTCAAACAGCTCAAAGAAGATTACTTTAAAAAGATCGAATGTTTTGATTCAGTTGA
GATAAGCGGAGTAGAGGATAGATTTAACGCAAGTCTTGGAACTTATCATGACCTTTTGAAGATCATCA
AGGATAAAGATTTTTTGGACAACGAGGAGAATGAAGATATCCTGGAAGATATAGTACTTACCTTGACG
CTTTTTGAAGATCGAGAGATGATCGAGGAGCGACTTAAGACGTACGCACATCTCTTTGACGATAAGGT
TATGAAACAATTGAAACGCCGGCGGTATACTGGCTGGGGCAGGCTTTCTCGAAAGCTGATTAATGGTA
TCCGCGATAAGCAGTCTGGAAAGACAATCCTTGACTTTCTGAAAAGTGATGGATTTGCAAATAGAAAC
TTTATGCAGCTTATACATGATGACTCTTTGACGTTCAAGGAAGACATCCAGAAGGCACAGGTATCCGG
CCAAGGGGATAGCCTCCATGAACACATAGCCAACCTGGCCGGCTCACCAGCTATTAAAAAGGGAATAT
TGCAAACCGTTAAGGTTGTTGACGAACTCGTTAAGGTTATGGGCCGACACAAACCAGAGAATATCGTG
ATTGAGATGGCTAGGGAGAATCAGACCACTCAAAAAGGTCAGAAAAATTCTCGCGAAAGGATGAAGCG
AATTGAAGAGGGAATCAAAGAACTTGGCTCTCAAATTTTGAAAGAGCACCCGGTAGAAAACACTCAGC
TGCAGAATGAAAAGCTGTATCTGTATTATCTGCAGAATGGTCGAGATATGTACGTTGATCAGGAGCTG
GATATCAATAGGCTCAGTGACTACGATGTCGACCACATCGTTCCTCAATCTTTCCTGAAAGATGACTC
TATCGACAACAAAGTGTTGACGCGATCAGATAAGAACCGGGGAAAATCCGACAATGTACCCTCAGAAG
AAGTTGTCAAGAAGATGAAAAACTATTGGAGACAATTGCTGAACGCCAAGCTCATAACACAACGCAAG
TTCGATAACTTGACGAAAGCCGAAAGAGGTGGGTTGTCAGAATTGGACAAAGCTGGCTTTATTAAGCG
CCAATTGGTGGAGACCCGGCAGATTACGAAACACGTAGCACAAATTTTGGATTCACGAATGAATACCA
AATACGACGAAAACGACAAATTGATACGCGAGGTGAAAGTGATTACGCTTAAGAGTAAGTTGGTTTCC
GATTTCAGGAAGGATTTTCAGTTTTACAAAGTAAGAGAAATAAACAACTACCACCACGCCCATGATGC
TTACCTCAACGCGGTAGTTGGCACAGCTCTTATCAAAAAATATCCAAAGCTGGAAAGCGAGTTCGTTT
ACGGTGACTATAAAGTATACGACGTTCGGAAGATGATAGCCAAATCAGAGCAGGAAATTGGGAAGGCA
ACCGCAAAATACTTCTTCTATTCAAACATCATGAACTTCTTTAAGACGGAGATTACGCTCGCGAACGG
CGAAATACGCAAGAGGCCCCTCATAGAGACTAACGGCGAAACCGGGGAGATCGTATGGGACAAAGGAC
GGGACTTTGCGACCGTTAGAAAAGTACTTTCAATGCCACAAGTGAATATTGTTAAAAAGACAGAAGTA
CAAACAGGGGGGTTCAGTAAGGAATCCATTTTGCCCAAGCGGAACAGTGATAAATTGATAGCAAGGAA
AAAAGATTGGGACCCTAAGAAGTACGGTGGTTTCGACTCTCCTACCGTTGCATATTCAGTCCTTGTAG
TTGCGAAAGTGGAAAAGGGGAAAAGTAAGAAGCTTAAGAGTGTTAAAGAGCTTCTGGGCATAACCATA
ATGGAACGGTCTAGCTTCGAGAAAAATCCAATTGACTTTCTCGAGGCTAAAGGTTACAAGGAGGTAAA
AAAGGACCTGATAATTAAACTCCCAAAGTACAGTCTCTTCGAGTTGGAGAATGGGAGGAAGAGAATGT
TGGCATCTGCAGGGGAGCTCCAAAAGGGGAACGAGCTGGCTCTGCCTTCAAAATACGTGAACTTTCTG
TACCTGGCCAGCCACTACGAGAAACTCAAGGGTTCTCCTGAGGATAACGAGCAGAAACAGCTGTTTGT
AGAGCAGCACAAGCATTACCIGGACGAGATAATTGAGCAAATTAGTGAGTICTCAAAAAGAGTAATCC
TTGCAGACGCGAATCTGGATAAAGTTCTTTCCGCCTATAATAAGCACCGGGACAAGCCTATACGAGAA
CAAGCCGAGAACATCATTCACCTCTTTACCCTTACTAATCTGGGCGCGCCGGCCGCCTTCAAATACTT
CGACACCACGATAGACAGGAAAAGGTATACGAGTACCAAAGAAGTACTTGACGCCACTCTCATCCACC
AGTCTATAACAGGGTTGTACGAAACGAGGATAGATTTGTCCCAGCTCGGCGGCGACTCAGGAGGGTCA
GGCGGCTCCGGTGGATCAACGAATCTTTCCGACATAATCGAGAAAGAAACCGGCAAACAGTTGGTGAT
CCAAGAATCAATCCTGATGCTGCCTGAAGAAGTAGAAGAGGTGATTGGCAACAAACCTGAGTCTGACA
TTCTTGTCCACACCGCGTATGACGAGAGCACGGACGAGAACGTTATGCTTCTCACTAGCGACGCCCCT
GAGTATAAACCATGGGCGCTGGTCATCCAAGATTCCAATGGGGAAAACAAGATTAAGATGCTTAGTGG
TGGGTCTGGAGGGAGCGGTGGGTCCACGAACCTCAGCGACATTATTGAAAAAGAGACTGGTAAACAAC
TTGTAATACAAGAGTCTATTCTGATGTTGCCTGAAGAGGTGGAGGAGGTGATTGGGAACAAACCGGAG
TCTGATATACTTGTTCATACCGCCTATGACGAATCTACTGATGAGAATGTGATGCTTTTaACGTCAGA
CGCTCCCGAGTACAAACCCTGGGCTCTGGTGATTCAGGACAGCAATGGTGAGAATAAGATTAAAATGT
TGAGTGGGGGCTCAAAGCGCACGGCTGACGGTAGCGAATTTGAGAAAAAAAAAAGCCCCCGAAAGGTC
GAAtaa

[0045] BE4 Codon Optimization 2 nucleic acid sequence:

ATGAGCAGCGAGACAGGCCCTGTGGCTGTGGATCCTACACTGCGGAGAAGAATCGAGCCCCACGAGTT
CGAGGTGTTCTTCGACCCCAGAGAGCTGCGGAAAGAGACATGCCTGCTGTACGAGATCAACTGGGGCG
GCAGACACTCTATCTGGCGGCACACAAGCCAGAACACCAACAAGCACGTGGAAGTGAACTTTATCGAG
AAGTTTACGACCGAGCGGTACTTCTGCCCCAACACCAGATGCAGCATCACCTGGTTTCTGAGCTGGTC
CCCTTGCGGCGAGTGCAGCAGAGCCATCACCGAGTTTCTGTCCAGATATCCCCACGTGACCCTGTTCA
TCTATATCGCCCGGCTGTACCACCACGCCGATCCTAGAAATAGACAGGGACTGCGCGACCTGATCAGC
AGCGGAGTGACCATCCAGATCATGACCGAGCAAGAGAGCGGCTACTGCTGGCGGAACTTCGTGAACTA
CAGCCCCAGCAACGAAGCCCACTGGCCTAGATATCCTCACCTGTGGGTCCGACTGTACGTGCTGGAAC
TGTACTGCATCATCCTGGGCCTGCCTCCATGCCTGAACATCCTGAGAAGAAAGCAGCCTCAGCTGACC
TTCTTCACAATCGCCCTGCAGAGCTGCCACTACCAGAGACTGCCTCCACACATCCTGTGGGCCACCGG
ACTTAAGAGCGGAGGATCTAGCGGCGGCTCTAGCGGATCTGAGACACCTGGCACAAGCGAGTCTGCCA
CACCTGAGAGTAGCGGCGGATCTTCTGGCGGCTCCGACAAGAAGTACTCTATCGGACTGGCCATCGGC
ACCAACTCTGTTGGATGGGCCGTGATCACCGACGAGTACAAGGTGCCCAGCAAGAAATTCAAGGTGCT
GGGCAACACCGACCGGCACAGCATCAAGAAGAATCTGATCGGCGCCCTGCTGTTCGACTCTGGCGAAA
CAGCCGAAGCCACCAGACTGAAGAGAACCGCCAGGCGGAGATACACCCGGCGGAAGAACCGGATCTGC
TACCTGCAAGAGATCTTCAGCAACGAGATGGCCAAGGTGGACGACAGCTTCTTCCACAGACTGGAAGA
GTCCTTCCTGGTGGAAGAGGACAAGAAGCACGAGCGGCACCCCATCTTCGGCAACATCGTGGATGAGG
TGGCCTACCACGAGAAGTACCCCACCATCTACCACCTGAGAAAGAAACTGGTGGACAGCACCGACAAG
GCCGACCTGAGACTGATCTACCTGGCTCTGGCCCACATGATCAAGTTCCGGGGCCACTTTCTGATCGA
GGGCGATCTGAACCCCGACAACAGCGACGTGGACAAGCTGTTCATCCAGCTGGTGCAGACCTACAACC
AGCTGTTCGAGGAAAACCCCATCAACGCCTCTGGCGTGGACGCCAAGGCTATCCTGTCTGCCAGACTG
AGCAAGAGCAGAAGGCTGGAAAACCTGATCGCCCAGCTGCCTGGCGAGAAGAAGAATGGCCTGTTCGG
CAACCTGATTGCCCTGAGCCTGGGACTGACCCCTAACTTCAAGAGCAACTTCGACCTGGCCGAGGATG
CCAAACTGCAGCTGAGCAAGGACACCTACGACGACGACCTGGACAATCTGCTGGCCCAGATCGGCGAT
CAGTACGCCGACTTGTTTCTGGCCGCCAAGAACCTGTCCGACGCCATCCTGCTGAGCGATATCCTGAG
AGTGAACACCGAGATCACAAAGGCCCCTCTGAGCGCCTCTATGATCAAGAGATACGACGAGCACCACC
AGGATCTGACCCTGCTGAAGGCCCTCGTTAGACAGCAGCTGCCAGAGAAGTACAAAGAGATTTTCTTC
GATCAGTCCAAGAACGGCTACGCCGGCTACATTGATGGCGGAGCCAGCCAAGAGGAATTCTACAAGTT
CATCAAGCCCATCCTGGAAAAGATGGACGGCACCGAGGAACTGCTGGTCAAGCTGAACAGAGAGGACC
TGCTGCGGAAGCAGCGGACCTTCGACAATGGCTCTATCCCTCACCAGATCCACCTGGGAGAGCTGCAC
GCCATTCTGCGGAGACAAGAGGACTTTTACCCATTCCTGAAGGACAACCGGGAAAAGATCGAGAAGAT
CCTGACCTTCAGGATCCCCTACTACGTGGGACCACTGGCCAGAGGCAATAGCAGATTCGCCTGGATGA
CCAGAAAGAGCGAGGAAACCATCACACCCTGGAACTTCGAGGAAGTGGTGGACAAGGGCGCCAGCGCT
CAGTCCTTCATCGAGCGGATGACCAACTTCGATAAGAACCTGCCTAACGAGAAGGTGCTGCCCAAGCA
CTCCCTGCTGTATGAGTACTTCACCGTGTACAACGAGCTGACCAAAGTGAAATACGTGACCGAGGGAA
TGAGAAAGCCCGCCTTTCTGAGCGGCGAGCAGAAAAAGGCCATTGTGGATCTGCTGTTCAAGACCAAC
CGGAAAGTGACCGTGAAGCAGCTGAAAGAGGACTACTTCAAGAAAATCGAGTGCTTCGACAGCGTGGA
AATCAGCGGCGTGGAAGATCGGTTCAATGCCAGCCTGGGCACATACCACGACCTGCTGAAAATTATCA
AGGACAAGGACTTCCTGGACAACGAAGAGAACGAGGACATTCTCGAGGACATCGTGCTGACCCTGACA
CTGTTTGAGGACAGAGAGATGATCGAGGAACGGCTGAAAACATACGCCCACCTGTTCGACGACAAAGT
GATGAAGCAACTGAAGCGGAGGCGGTACACAGGCTGGGGCAGACTGTCTCGGAAGCTGATCAACGGCA
TCCGGGATAAGCAGTCCGGCAAGACAATCCTGGATTTCCTGAAGTCCGACGGCTTCGCCAACAGAAAC
TTCATGCAGCTGATCCACGACGACAGCCTGACCTTTAAAGAGGACATCCAGAAAGCCCAGGTGTCCGG
CCAAGGCGATTCTCTGCACGAGCACATTGCCAACCTGGCCGGATCTCCCGCCATTAAGAAGGGCATCC
TGCAGACAGTGAAGGTGGTGGACGAGCTTGTGAAAGTGATGGGCAGACACAAGCCCGAGAACATCGTG
ATCGAAATGGCCAGAGAGAACCAGACCACACAGAAGGGCCAGAAGAACAGCCGCGAGAGAATGAAGCG
GATCGAAGAGGGCATCAAAGAGCTGGGCAGCCAGATCCTGAAAGAACACCCCGTGGAAAACACCCAGC
TGCAGAACGAGAAGCTGTACCTGTACTACCTGCAGAATGGACGGGATATGTACGTGGACCAAGAGCTG
GACATCAACCGGCTGAGCGACTACGATGTGGACCATATCGTGCCCCAGAGCTTTCTGAAGGACGACTC
CATCGATAACAAGGTCCTGACCAGAAGCGACAAGAACCGGGGCAAGAGCGATAACGTGCCCTCCGAAG
AGGTGGTCAAGAAGATGAAGAACTACTGGCGACAGCTGCTGAACGCCAAGCTGATTACCCAGCGGAAG
TTCGATAACCTGACCAAGGCCGAGAGAGGCGGCCTGAGCGAACTTGATAAGGCCGGCTTCATTAAGCG
GCAGCTGGTGGAAACCCGGCAGATCACCAAACACGTGGCACAGATTCTGGACTCCCGGATGAACACTA
AGTACGACGAGAATGACAAGCTGATCCGGGAAGTGAAAGTCATCACCCTGAAGTCTAAGCTGGTGTCC
GATTTCCGGAAGGATTTCCAGTTCTACAAAGTGCGGGAAATCAACAACTACCATCACGCCCACGACGC
CTACCTGAATGCCGTTGTTGGAACAGCCCTGATCAAGAAGTATCCCAAGCTGGAAAGCGAGTTCGTGT
ACGGCGACTACAAGGTGTACGACGTGCGGAAGATGATCGCCAAGAGCGAACAAGAGATCGGCAAGGCT
ACCGCCAAGTACTTTTTCTACAGCAACATCATGAACTTTTTCAAGACAGAGATCACCCTGGCCAACGG
CGAGATCCGGAAAAGACCCCTGATCGAGACAAACGGCGAAACCGGGGAGATCGTGTGGGATAAGGGCA
GAGATTTTGCCACAGTGCGGAAAGTGCTGAGCATGCCCCAAGTGAATATCGTGAAGAAAACCGAGGTG
CAGACAGGCGGCTTCAGCAAAGAGTCTATCCTGCCTAAGCGGAACAGCGATAAGCTGATCGCCAGAAA
GAAGGACTGGGACCCTAAGAAGTACGGCGGCTTCGATAGCCCTACCGTGGCCTATTCTGTGCTGGTGG
TGGCCAAAGTGGAAAAGGGCAAGTCCAAAAAGCTCAAGAGCGTGAAAGAGCTGCTGGGGATCACCATC
ATGGAAAGAAGCAGCTTTGAGAAGAACCCGATCGACTTTCTGGAAGCCAAGGGCTACAAAGAAGTCAA
GAAGGACCTCATCATCAAGCTCCCCAAGTACAGCCTGTTCGAGCTGGAAAATGGCCGGAAGCGGATGC
TGGCCTCAGCAGGCGAACTGCAGAAAGGCAATGAACTGGCCCTGCCTAGCAAATACGTCAACTTCCTG
TACCTGGCCAGCCACTATGAGAAGCTGAAGGGCAGCCCCGAGGACAATGAGCAAAAGCAGCTGTTTGT
GGAACAGCACAAGCACTACCTGGACGAGATCATCGAGCAGATCAGCGAGTTCTCCAAGAGAGTGATCC
TGGCCGACGCTAACCTGGATAAGGTGCTGTCTGCCTATAACAAGCACCGGGACAAGCCTATCAGAGAG
CAGGCCGAGAATATCATCCACCTGTTTACCCTGACCAACCTGGGAGCCCCTGCCGCCTTCAAGTACTT
CGACACCACCATCGACCGGAAGAGGTACACCAGCACCAAAGAGGTGCTGGACGCCACACTGATCCACC
AGTCTATCACCGGCCTGTACGAAACCCGGATCGACCTGTCTCAGCTCGGCGGCGATTCTGGTGGTTCT
GGCGGAAGTGGCGGATCCACCAATCTGAGCGACATCATCGAAAAAGAGACAGGCAAGCAGCTCGTGAT
CCAAGAATCCATCCTGATGCTGCCTGAAGAGGTTGAGGAAGTGATCGGCAACAAGCCTGAGTCCGACA
TCCTGGTGCACACCGCCTACGATGAGAGCACCGATGAGAACGTCATGCTGCTGACAAGCGACGCCCCT
GAGTACAAGCCTTGGGCTCTCGTGATTCAGGACAGCAATGGGGAGAACAAGATCAAGATGCTGAGCGG
AGGTAGCGGAGGCAGTGGCGGAAGCACAAACCTGTCTGATATCATTGAAAAAGAAACCGGGAAGCAAC
TGGTCATTCAAGAGTCCATTCTCATGCTCCCGGAAGAAGTCGAGGAAGTCATTGGAAACAAACCCGAG
AGCGATATTCTGGTCCACACAGCCTATGACGAGTCTACAGACGAAAACGTGATGCTCCTGACCTCTGA
CGCTCCCGAGTATAAGCCCTGGGCACTTGTTATCCAGGACTCTAACGGGGAAAACAAAATCAAAATGT
TGTCCGGCGGCAGCAAGCGGACAGCCGATGGATCTGAGTTCGAGAGCCCCAAGAAGAAACGGAAGGTg
GAGtaa

[0046] By “base editing activity” is meant acting to chemically alter a base within a polynucleotide. In one embodiment, a first base is converted to a second base. In one embodiment, the base editing activity is cytidine deaminase activity, e.g., converting target C•G to T•A. In another embodiment, the base editing activity is adenosine or adenine deaminase activity, e.g., converting A•T to G•C. In another embodiment, the base editing activity is cytidine deaminase activity, e.g., converting target C•G to T•A and adenosine or adenine deaminase activity, e.g., converting A•T to G•C.

[0047] The term “base editor system” or “BE system” refers to a system for editing a nucleobase of a target nucleotide sequence. In various embodiments, the base editor (BE) system comprises (1) a polynucleotide programmable nucleotide binding domain, a deaminase domain and a cytidine deaminase domain for deaminating nucleobases in the target nucleotide sequence; and (2) one or more guide polynucleotides (e.g., guide RNA) in conjunction with the polynucleotide programmable nucleotide binding domain. In various embodiments, the base editor (BE) system comprises two or more nucleobase editor domains selected from an adenosine deaminase and/or a cytidine deaminase, and DNA glycosylase, and a domain having nucleic acid sequence specific binding activity. In some embodiments, the base editor system comprises (1) a base editor (BE) comprising a polynucleotide programmable DNA binding domain and one or more deaminase domains for deaminating one or more nucleobases in a target nucleotide sequence; and (2) one or more guide RNAs in conjunction with the polynucleotide programmable DNA binding domain. In some embodiments, the polynucleotide programmable nucleotide binding domain is a polynucleotide programmable DNA binding domain. In some embodiments, the base editor is a cytidine base editor (CBE). In some embodiments, the base editor is an adenine or adenosine base editor (ABE). In some embodiments, the base editor is an adenine or adenosine base editor (ABE) and a cytidine base editor (CBE), e.g., a multi-effector base editor.

[0048] The term “Cas9” or “Cas9 domain” refers to an RNA guided nuclease comprising a Cas9 protein, or a fragment thereof (e.g., a protein comprising an active, inactive, or partially active DNA cleavage domain of Cas9, and/or the gRNA binding domain of Cas9). A Cas9 nuclease is also referred to sometimes as a casnl nuclease or a CRISPR (clustered regularly interspaced short palindromic repeat) associated nuclease. An exemplary Cas9, is Streptococcus pyogenes Cas9 (spCas9), the amino acid sequence of which is provided below:

MDKKYSIGLDIGTNSVGWAVITDDYKVPSKKFKVLGNTDRHSIKKNLIGALLFGSGETAEAT
RLKRTARRRYTRRKNRICYLQEIFSNEMAKVDDSFFHRLEESFLVEEDKKHERHPIFGNIVD
EVAYHEKYPTIYHLRKKLADSTDKADLRLIYLALAHMIKFRGHFLIEGDLNPDNSDVDKLFI
QLVQIYNQLFEENPINASRVDAKAILSARLSKSRRLENLIAQLPGEKRNGLFGNLIALSLGL
TPNFKSNFDLAEDAKLQLSKDTYDDDLDNLLAQIGDQYADLFLAAKNLSDAILLSDILRVNS
EITKAPLSASMIKRYDEHHQDLTLLKALVRQQLPEKYKEIFFDQSKNGYAGYIDGGASQEEF
YKFIKPILEKMDGTEELLVKLNREDLLRKQRTFDNGSIPHQIHLGELHAILRRQEDFYPFLK
DNREKIEKILTFRIPYYVGPLARGNSRFAWMTRKSEETITPWNFEEVVDKGASAQSFIERMT
NFDKNLPNEKVLPKHSLLYEYFTVYNELTKVKYVTEGMRKPAFLSGEQKKAIVDLLFKTNRK
VTVKQLKEDYFKKIECFDSVEISGVEDRFNASLGAYHDLLKIIKDKDFLDNEENEDILEDIV
LTLTLFEDRGMIEERLKTYAHLFDDKVMKQLKRRRYTGWGRLSRKLINGIRDKQSGKTILDF
LKSDGFANRNFMQLIHDDSLTFKEDIQKAQVSGQGHSLHEQIANLAGSPAIKKGILQTVKIV
DELVKVMGHKPENIVIEMARENQTTQKGQKNSRERMKRIEEGIKELGSQILKEHPVENTQLQ
NEKLYLYYLQNGRDMYVDQELDINRLSDYDVDHIVPQSFIKDDSIDNKVLTRSDKNRGKSDN
VPSEEVVKKMKNYWRQLLNAKLITQRKFDNLTKAERGGLSELDKAGFIKRQLVETRQITKHV
AQILDSRMNTKYDENDKLIREVKVITLKSKLVSDFRKDFQFYKVREINNYHHAHDAYLNAVV
GTALIKKYPKLESEFVYGDYKVYDVRKMIAKSEQEIGKATAKYFFYSNIMNFFKTEITLANG
EIRKRPLIETNGETGEIVWDKGRDFATVRKVLSMPQVNIVKKTEVQTGGFSKESILPKRNSD
KLIARKKDWDPKKYGGFDSPTVAYSVLVVAKVEKGKSKKLKSVKELLGITIMERSSFEKNPI
DFLEAKGYKEVKKDLIIKLPKYSLFELENGRKRMLASAGELQKGNELALPSKYVNFLYLASH
YEKLKGSPEDNEQKQLFVEQHKHYLDEIIEQISEFSKRVILADANLDKVLSAYNKHRDKPIR
EQAENIIHLFTLTNLGAPAAFKYFDTTIDRKRYTSTKEVLDATLIHQSITGLYETRIDLSQL
GGD

(single underline: HNH domain; double underline: RuvC domain)

[0049] The term “conservative amino acid substitution” or “conservative mutation” refers to the replacement of one amino acid by another amino acid with a common property. A functional way to define common properties between individual amino acids is to analyze the normalized frequencies of amino acid changes between corresponding proteins of homologous organisms (Schulz, G. E. and Schirmer, R. H., Principles of Protein Structure, Springer-Verlag, New York (1979)). According to such analyses, groups of amino acids can be defined where amino acids within a group exchange preferentially with each other, and therefore resemble each other most in their impact on the overall protein structure (Schulz, G. E. and Schirmer, R. H., supra). Non-limiting examples of conservative mutations include amino acid substitutions of amino acids, for example, lysine for arginine and vice versa such that a positive charge can be maintained; glutamic acid for aspartic acid and vice versa such that a negative charge can be maintained; serine for threonine such that a free —OH can be maintained; and glutamine for asparagine such that a free —NH₂ can be maintained.

[0050] The term “coding sequence” or “protein coding sequence” as used interchangeably herein refers to a segment of a polynucleotide that codes for a protein. The region or sequence is bounded nearer the 5′ end by a start codon and nearer the 3′ end with a stop codon. Coding sequences can also be referred to as open reading frames.

[0051] By “cytidine deaminase” is meant a polypeptide or fragment thereof capable of catalyzing a deamination reaction that converts an amino group to a carbonyl group. In one embodiment, the cytidine deaminase converts cytosine to uracil or 5-methylcytosine to thymine. PmCDA1 derived from Petromyzon marinus (Petromyzon marinus cytosine deaminase 1), or AID (Activation-induced cytidine deaminase; AICDA) derived from a mammal (e.g., human, swine, bovine, horse, monkey etc.), and APOBEC are exemplary cytidine deaminases.

[0052] The term “deaminase” or “deaminase domain,” as used herein, refers to a protein or enzyme that catalyzes a deamination reaction. In some embodiments, the deaminase or deaminase domain is a cytidine deaminase, catalyzing the hydrolytic deamination of cytidine or deoxycytidine to uridine or deoxyuridine, respectively. In some embodiments, the deaminase or deaminase domain is a cytosine deaminase, catalyzing the hydrolytic deamination of cytosine to uracil. In some embodiments, the deaminase is an adenosine deaminase, which catalyzes the hydrolytic deamination of adenine to hypoxanthine. In some embodiments, the deaminase is an adenosine deaminase, which catalyzes the hydrolytic deamination of adenosine or adenine (A) to inosine (I). In some embodiments, the deaminase or deaminase domain is an adenosine deaminase, catalyzing the hydrolytic deamination of adenosine or deoxyadenosine to inosine or deoxyinosine, respectively. In some embodiments, the adenosine deaminase catalyzes the hydrolytic deamination of adenosine in deoxyribonucleic acid (DNA). The adenosine deaminases (e.g., engineered adenosine deaminases, evolved adenosine deaminases) provided herein can be from any organism, such as a bacterium. In some embodiments, the adenosine deaminase is from a bacterium, such as E. coli, S. aureus, S. typhi, S. putrefaciens, H. influenzae, or C. crescentus. In some embodiments, the adenosine deaminase is a TadA deaminase. In some embodiments, the deaminase or deaminase domain is a variant of a naturally occurring deaminase from an organism, such as a human, chimpanzee, gorilla, monkey, cow, dog, rat, or mouse. In some embodiments, the deaminase or deaminase domain does not occur in nature. For example, in some embodiments, the deaminase or deaminase domain is at least 50%, at least 55%, at least 60%, at least 65%, at least 70%, at least 75% at least 80%, at least 85%, at least 90%, at least 91%, at least 92%, at least 93%, at least 94%, at least 95%, at least 96%, at least 97%, at least 98%, at least 99%, at least 99.1%, at least 99.2%, at least 99.3%, at least 99.4%, at least 99.5%, at least 99.6%, at least 99.7%, at least 99.8%, or at least 99.9% identical to a naturally occurring deaminase.

[0053] “Detect” refers to identifying the presence, absence or amount of the analyte to be detected. In one embodiment, a sequence alteration in a polynucleotide or polypeptide is detected. In another embodiment, the presence of indels is detected.

[0054] By “detectable label” is meant a composition that when linked to a molecule of interest renders the latter detectable, via spectroscopic, photochemical, biochemical, immunochemical, or chemical means. For example, useful labels include radioactive isotopes, magnetic beads, metallic beads, colloidal particles, fluorescent dyes, electron-dense reagents, enzymes (for example, as commonly used in an enzyme linked immunosorbent assay (ELISA)), biotin, digoxigenin, or haptens.

[0055] By “disease” is meant any condition or disorder that damages or interferes with the normal function of a cell, tissue, or organ.

[0056] By “effective amount” is meant the amount of an agent or active compound, e.g., a base editor as described herein, that is required to ameliorate the symptoms of a disease relative to an untreated patient or an individual without disease, i.e., a healthy individual, or is the amount of the agent or active compound sufficient to elicit a desired biological response. The effective amount of active compound(s) used to practice the present invention for therapeutic treatment of a disease varies depending upon the manner of administration, the age, body weight, and general health of the subject. Ultimately, the attending physician or veterinarian will decide the appropriate amount and dosage regimen. Such amount is referred to as an “effective” amount. In one embodiment, an effective amount is the amount of a base editor of the invention sufficient to introduce an alteration in a gene of interest in a cell (e.g., a cell in vitro or in vivo). In one embodiment, an effective amount is the amount of a base editor required to achieve a therapeutic effect. Such therapeutic effect need not be sufficient to alter a pathogenic gene in all cells of a subject, tissue or organ, but only to alter the pathogenic gene in about 1%, 5%, 10%, 25%, 50%, 75% or more of the cells present in a subject, tissue or organ. In one embodiment, an effective amount is sufficient to ameliorate one or more symptoms of a disease.

[0057] In some embodiments, an effective amount of a fusion protein provided herein, e.g., of a multi-effector nucleobase editor comprising a nCas9 domain and one or more deaminase domains (e.g., adenosine deaminase, cytidine deaminase) refers to the amount that is sufficient to induce editing of a target site specifically bound and edited by the multi-effector nucleobase editors described herein. As will be appreciated by the skilled artisan, the effective amount of an agent, e.g., a fusion protein, may vary depending on various factors as, for example, on the desired biological response, e.g., on the specific allele, genome, or target site to be edited, on the cell or tissue being targeted, and/or on the agent being used.

[0058] In some embodiments, an effective amount of a fusion protein provided herein, e.g., of a fusion protein comprising a nCas9 domain may refer to the amount of the fusion protein that is sufficient to induce editing of a target site specifically bound and edited by the fusion protein. As will be appreciated by the skilled artisan, the effective amount of an agent, e.g., a fusion protein, a nuclease, a methylase, a hybrid protein, a protein dimer, a complex of a protein (or protein dimer) and a polynucleotide, or a polynucleotide, may vary depending on various factors as, for example, on the desired biological response, e.g., on the specific allele, genome, or target site to be edited, on the cell or tissue being targeted, and/or on the agent being used.

[0059] By “fragment” is meant a portion of a polypeptide or nucleic acid molecule. This portion contains, at least 10%, 20%, 30%, 40%, 50%, 60%, 70%, 80%, or 90% of the entire length of the reference nucleic acid molecule or polypeptide. A fragment may contain 10, 20, 30, 40, 50, 60, 70, 80, 90, or 100, 200, 300, 400, 500, 600, 700, 800, 900, or 1000 nucleotides or amino acids.

[0060] By “guide RNA” or “gRNA” is meant a polynucleotide which is specific for a target sequence and can form a complex with a polynucleotide programmable nucleotide binding domain protein (e.g., Cas9 or Cpf1). In an embodiment, the guide polynucleotide is a guide RNA (gRNA). gRNAs can exist as a complex of two or more RNAs, or as a single RNA molecule. gRNAs that exist as a single RNA molecule may be referred to as single-guide RNAs (sgRNAs), although “gRNA” is used interchangeably to refer to guide RNAs that exist as either single molecules or as a complex of two or more molecules. Typically, gRNAs that exist as single RNA species comprise two domains: (1) a domain that shares homology to a target nucleic acid (e.g., and directs binding of a Cas9 complex to the target); and (2) a domain that binds a Cas9 protein. In some embodiments, domain (2) corresponds to a sequence known as a tracrRNA, and comprises a stem-loop structure. For example, in some embodiments, domain (2) is identical or homologous to a tracrRNA as provided in Jinek et al., Science 337:816-821(2012), the entire contents of which is incorporated herein by reference. Other examples of gRNAs (e.g., those including domain 2) can be found in US20160208288, entitled “Switchable Cas9 Nucleases and Uses Thereof,” and U.S. Pat. No. 9,737,604, entitled “Delivery System For Functional Nucleases,” the entire contents of each are hereby incorporated by reference in their entirety. In some embodiments, a gRNA comprises two or more of domains (1) and (2), and may be referred to as an “extended gRNA.” An extended gRNA will bind two or more Cas9 proteins and bind a target nucleic acid at two or more distinct regions, as described herein. The gRNA comprises a nucleotide sequence that complements a target site, which mediates binding of the nuclease/RNA complex to the target site, providing the sequence specificity of the nuclease:RNA complex.

[0061] “Hybridization” means hydrogen bonding, which may be Watson-Crick, Hoogsteen or reversed Hoogsteen hydrogen bonding, between complementary nucleobases. For example, adenine and thymine are complementary nucleobases that pair through the formation of hydrogen bonds.

[0062] By “increases” is meant a positive alteration of at least 10%, 25%, 50%, 75%, or 100%.

[0063] The terms “inhibitor of base repair”, “base repair inhibitor”, “IBR” or their grammatical equivalents refer to a protein that is capable in inhibiting the activity of a nucleic acid repair enzyme, for example a base excision repair enzyme. In some embodiments, the IBR is an inhibitor of inosine base excision repair. Exemplary inhibitors of base repair include inhibitors of APE1, Endo III, Endo IV, Endo V, Endo VIII, Fpg, hOGG1, hNEILl, T7 Endo1, T4PDG, UDG, hSMUG1, and hAAG. In some embodiments, the base repair inhibitor is an inhibitor of Endo V or hAAG. In some embodiments, the IBR is an inhibitor of Endo V or hAAG. In some embodiments, the IBR is a catalytically inactive EndoV or a catalytically inactive hAAG. In some embodiments, the base repair inhibitor is a catalytically inactive EndoV or a catalytically inactive hAAG. In some embodiments, the base repair inhibitor is uracil glycosylase inhibitor (UGI). UGI refers to a protein that is capable of inhibiting a uracil-DNA glycosylase base-excision repair enzyme. In some embodiments, a UGI domain comprises a wild-type UGI or a fragment of a wild-type UGI. In some embodiments, the UGI proteins provided herein include fragments of UGI and proteins homologous to a UGI or a UGI fragment. In some embodiments, the base repair inhibitor is an inhibitor of inosine base excision repair. In some embodiments, the base repair inhibitor is a “catalytically inactive inosine specific nuclease” or “dead inosine specific nuclease.” Without wishing to be bound by any particular theory, catalytically inactive inosine glycosylases (e.g., alkyl adenine glycosylase (AAG)) can bind inosine, but cannot create an abasic site or remove the inosine, thereby sterically blocking the newly formed inosine moiety from DNA damage/repair mechanisms. In some embodiments, the catalytically inactive inosine specific nuclease can be capable of binding an inosine in a nucleic acid but does not cleave the nucleic acid. Non-limiting exemplary catalytically inactive inosine specific nucleases include catalytically inactive alkyl adenosine glycosylase (AAG nuclease), for example, from a human, and catalytically inactive endonuclease V (EndoV nuclease), for example, from E. coli. In some embodiments, the catalytically inactive AAG nuclease comprises an E125Q mutation or a corresponding mutation in another AAG nuclease.

[0064] An “intein” is a fragment of a protein that is able to excise itself and join the remaining fragments (the exteins) with a peptide bond in a process known as protein splicing. Inteins are also referred to as “protein introns.” The process of an intein excising itself and joining the remaining portions of the protein is herein termed “protein splicing” or “intein-mediated protein splicing.” In some embodiments, an intein of a precursor protein (an intein containing protein prior to intein-mediated protein splicing) comes from two genes. Such intein is referred to herein as a split intein (e.g., split intein-N and split intein-C). For example, in cyanobacteria, DnaE, the catalytic subunit a of DNA polymerase III, is encoded by two separate genes, dnaE-n and dnaE-c. The intein encoded by the dnaE-n gene may be herein referred as “intein-N.” The intein encoded by the dnaE-c gene may be herein referred as “intein-C.”

[0065] Other intein systems may also be used. For example, a synthetic intein based on the dnaE intein, the Cfa-N (e.g., split intein-N) and Cfa-C (e.g., split intein-C) intein pair, has been described (e.g., in Stevens et al., J Am Chem Soc. 2016 Feb. 24; 138(7):2162-5, incorporated herein by reference). Non-limiting examples of intein pairs that may be used in accordance with the present disclosure include: Cfa DnaE intein, Ssp GyrB intein, Ssp DnaX intein, Ter DnaE3 intein, Ter ThyX intein, Rma DnaB intein and Cne Prp8 intein (e.g., as described in U.S. Pat. No. 8,394,604, incorporated herein by reference.

[0066] Exemplary nucleotide and amino acid sequences of inteins are provided.

DnaE Intein-N DNA:
TGCCTGTCATACGAAACCGAGATACTGACAGTAGAATATGGCCTTCTGCCATCGGGAAGAT
TGTGGAGAAACGGATAGAATGCACAGTTTACTCTGTCGATAACAATGGTAACATTTATACTC
AGCCAGTTGCCCAGTGGCACGACCGGGGAGAGCAGGAAGTATTCGAATACTGTCTGGAGGAT
GGAAGTCTCATTAGGGCCACTAAGGACCACAAATTTATGACAGTCGATGGCCAGATGCTGCC
TATAGACGAAATCTTTGAGCGAGAGTTGGACCTCATGCGAGTTGACAACCTTCCTAT
DnaE Intein-N Protein:
CLSYETEILTVEYGLLPIGKIVEKRIECTVYSVDNNGNIYTQPVAQWHDR
GEQEVFEYCLEDGSLIRATKDHKFMTVDGQMLPIDEIFERELDLMRVDNLPN
DnaE Intein-C DNA:
ATGATCAAGATAGCTACAAGGAAGTATCTTGGCAAACAAAACGTTTATGA
TATTGGAGTCGAAAGAGATCACAACTTTGCTCTGAAGAACGGATTCATAGCTTCTAAT
Intein-C:MIKIATRKYLGKQNVYDIGVERDHNFALKNGFIASN
Cfa-N DNA:
TGCCTGTCTTATGATACCGAGATACTTACCGTTGAATATGGCTTCTTGCCTATTGGAAAGAT
TGTCGAAGAGAGAATTGAATGCACAGTATATACTGTAGACAAGAATGGTTTCGTTTACACAC
AGCCCATTGCTCATGGCACAATCGCGGCGAACAAGAAGTATTTGAGTACTGTCTCGAGGAT
GGAAGCATCATACGAGCAACTAAAGATCATAAATTCATGACCACTGACGGGCAGATGTTGCC
AATAGATGAGATATTCGAGCGGGGCTTGGATCTCAAACAAGTGGATGGATTGCCA
Cfa-N Protein:
CLSYDTEILTVEYGFLPIGKIVEERIECTVYTVDKNGFVYTQPIAQWHNRGEQEVFEYCLED
GSIIRATKDHKFMTTDGQMLPIDEIFERGLDLKQVDGLP
Cfa-C DNA:
ATGAAGAGGACTGCCGATGGATCAGAGTTTGAATCTCCCAAGAAGAAGAGGAAAGTAAAGAT
AATATCTCGAAAAAGTCTTGGTACCCAAAATGTCTATGATATTGGAGTGGAGAAAGATCACA
ACTTCCTTCTCAAGAACGGTCTCGTAGCCAGCAAC
Cfa-C Protein:
MKRTADGSEFESPKKKRKVKIISRKSLGTQNVYDIGVEKDHNFLLKNGLVASN

[0067] Intein-N and intein-C may be fused to the N-terminal portion of the split Cas9 and the C-terminal portion of the split Cas9, respectively, for the joining of the N-terminal portion of the split Cas9 and the C-terminal portion of the split Cas9. For example, in some embodiments, an intein-N is fused to the C-terminus of the N-terminal portion of the split Cas9, i.e., to form a structure of N-[N-terminal portion of the split Cas9]-[intein-N]-C. In some embodiments, an intein-C is fused to the N-terminus of the C-terminal portion of the split Cas9, i.e., to form a structure of N-[intein-C]-[C-terminal portion of the split Cas9]-C. The mechanism of intein-mediated protein splicing for joining the proteins the inteins are fused to (e.g., split Cas9) is known in the art, e.g., as described in Shah et al., Chem Sci. 2014; 5(1):446-461, incorporated herein by reference. Methods for designing and using inteins are known in the art and described, for example by WO2014004336, WO2017132580, US20150344549, and US20180127780, each of which is incorporated herein by reference in their entirety.

[0068] The terms “isolated,” “purified,” or “biologically pure” refer to material that is free to varying degrees from components which normally accompany it as found in its native state. “Isolate” denotes a degree of separation from original source or surroundings. “Purify” denotes a degree of separation that is higher than isolation. A “purified” or “biologically pure” protein is sufficiently free of other materials such that any impurities do not materially affect the biological properties of the protein or cause other adverse consequences. That is, a nucleic acid or peptide of this invention is purified if it is substantially free of cellular material, viral material, or culture medium when produced by recombinant DNA techniques, or chemical precursors or other chemicals when chemically synthesized. Purity and homogeneity are typically determined using analytical chemistry techniques, for example, polyacrylamide gel electrophoresis or high-performance liquid chromatography. The term “purified” can denote that a nucleic acid or protein gives rise to essentially one band in an electrophoretic gel. For a protein that can be subjected to modifications, for example, phosphorylation or glycosylation, different modifications may give rise to different isolated proteins, which can be separately purified.

[0069] By “isolated polynucleotide” is meant a nucleic acid (e.g., a DNA) that is free of the genes which, in the naturally-occurring genome of the organism from which the nucleic acid molecule of the invention is derived, flank the gene. The term therefore includes, for example, a recombinant DNA that is incorporated into a vector; into an autonomously replicating plasmid or virus; or into the genomic DNA of a prokaryote or eukaryote; or that exists as a separate molecule (for example, a cDNA or a genomic or cDNA fragment produced by PCR or restriction endonuclease digestion) independent of other sequences. In addition, the term includes an RNA molecule that is transcribed from a DNA molecule, as well as a recombinant DNA that is part of a hybrid gene encoding additional polypeptide sequence.

[0070] By an “isolated polypeptide” is meant a polypeptide of the invention that has been separated from components that naturally accompany it. Typically, the polypeptide is isolated when it is at least 60%, by weight, free from the proteins and naturally-occurring organic molecules with which it is naturally associated. In some embodiments, the preparation is at least 75%, at least 90%, or at least 99%, by weight, a polypeptide of the invention. An isolated polypeptide of the invention may be obtained, for example, by extraction from a natural source, by expression of a recombinant nucleic acid encoding such a polypeptide; or by chemically synthesizing the protein. Purity can be measured by any appropriate method, for example, column chromatography, polyacrylamide gel electrophoresis, or by HPLC analysis.

[0071] The term “linker”, as used herein, can refer to a covalent linker (e.g., covalent bond), a non-covalent linker, a chemical group, or a molecule linking two molecules or moieties, e.g., two components of a protein complex or a ribonucleocomplex, or two domains of a fusion protein, such as, for example, a polynucleotide programmable DNA binding domain (e.g., dCas9) and a deaminase domain (e.g., an adenosine deaminase, a cytidine deaminase, or an adenosine deaminase and a cytidine deaminase). A linker can join different components of, or different portions of components of, a base editor system. For example, in some embodiments, a linker can join a guide polynucleotide binding domain of a polynucleotide programmable nucleotide binding domain and a catalytic domain of a deaminase. In some embodiments, a linker can join a CRISPR polypeptide and a deaminase. In some embodiments, a linker can join a Cas9 and a deaminase. In some embodiments, a linker can join a dCas9 and a deaminase. In some embodiments, a linker can join a nCas9 and a deaminase. In some embodiments, a linker can join a guide polynucleotide and a deaminase. In some embodiments, a linker can join a deaminating component and a polynucleotide programmable nucleotide binding component of a base editor system. In some embodiments, a linker can join a RNA-binding portion of a deaminating component and a polynucleotide programmable nucleotide binding component of a base editor system. In some embodiments, a linker can join a RNA-binding portion of a deaminating component and a RNA-binding portion of a polynucleotide programmable nucleotide binding component of a base editor system. A linker can be positioned between, or flanked by, two groups, molecules, or other moieties and connected to each one via a covalent bond or non-covalent interaction, thus connecting the two. In some embodiments, the linker can be an organic molecule, group, polymer, or chemical moiety. In some embodiments, the linker can be a polynucleotide. In some embodiments, the linker can be a DNA linker. In some embodiments, the linker can be a RNA linker. In some embodiments, a linker can comprise an aptamer capable of binding to a ligand. In some embodiments, the ligand may be carbohydrate, a peptide, a protein, or a nucleic acid. In some embodiments, the linker may comprise an aptamer may be derived from a riboswitch. The riboswitch from which the aptamer is derived may be selected from a theophylline riboswitch, a thiamine pyrophosphate (TPP) riboswitch, an adenosine cobalamin (AdoCbl) riboswitch, an S-adenosyl methionine (SAM) riboswitch, an SAH riboswitch, a flavin mononucleotide (FMN) riboswitch, a tetrahydrofolate riboswitch, a lysine riboswitch, a glycine riboswitch, a purine riboswitch, a GlmS riboswitch, or a pre-queosine1 (PreQ1) riboswitch. In some embodiments, a linker may comprise an aptamer bound to a polypeptide or a protein domain, such as a polypeptide ligand. In some embodiments, the polypeptide ligand may be a K Homology (KH) domain, a MS2 coat protein domain, a PP7 coat protein domain, a SfMu Com coat protein domain, a sterile alpha motif, a telomerase Ku binding motif and Ku protein, a telomerase Sm7 binding motif and Sm7 protein, or a RNA recognition motif. In some embodiments, the polypeptide ligand may be a portion of a base editor system component. For example, a nucleobase editing component may comprise a deaminase domain and a RNA recognition motif.

[0072] In some embodiments, the linker can be an amino acid or a plurality of amino acids (e.g., a peptide or protein). In some embodiments, the linker can be about 5-100 amino acids in length, for example, about 5, 6, 7, 8, 9, 10, 11, 12, 13, 14, 15, 16, 17, 18, 19, 20, 20-30, 30-40, 40-50, 50-60, 60-70, 70-80, 80-90, or 90-100 amino acids in length. In some embodiments, the linker can be about 100-150, 150-200, 200-250, 250-300, 300-350, 350-400, 400-450, or 450-500 amino acids in length. Longer or shorter linkers can be also contemplated.

[0073] In some embodiments, a linker joins a gRNA binding domain of an RNA-programmable nuclease, including a Cas9 nuclease domain, and the catalytic domain of a nucleic-acid editing protein (e.g., cytidine or adenosine deaminase). In some embodiments, a linker joins a dCas9 and a nucleic-acid editing protein. For example, the linker is positioned between, or flanked by, two groups, molecules, or other moieties and connected to each one via a covalent bond, thus connecting the two. In some embodiments, the linker is an amino acid or a plurality of amino acids (e.g., a peptide or protein). In some embodiments, the linker is an organic molecule, group, polymer, or chemical moiety. In some embodiments, the linker is 5-200 amino acids in length, for example, 5, 6, 7, 8, 9, 10, 11, 12, 13, 14, 15, 16, 17, 18, 19, 20, 25, 35, 45, 50, 55, 60, 60, 65, 70, 70, 75, 80, 85, 90, 90, 95, 100, 101, 102, 103, 104, 105, 110, 120, 130, 140, 150, 160, 175, 180, 190, or 200 amino acids in length.

[0074] In some embodiments, the domains of a base editor are fused via a linker that comprises the amino acid sequence of SGGSSGSETPGTSESATPESSGGS, SGGSSGGSSGSETPGTSESATPESSGGSSGGS, or GGSGGSPGSPAGSPTSTEEGTSESATPESGPGTSTEPSEGSAPGSPAGSPTSTEEGTSTE PSEGSAPGTSTEPSEGSAPGTSESATPESGPGSEPATSGGSGGS. In some embodiments, domains of the base editor are fused via a linker comprising the amino acid sequence SGSETPGTSESATPES, which may also be referred to as the XTEN linker. In some embodiments, the linker is 24 amino acids in length. In some embodiments, the linker comprises the amino acid sequence SGGSSGGSSGSETPGTSESATPES. In some embodiments, the linker is 40 amino acids in length. In some embodiments, the linker comprises the amino acid sequence SGGSSGGSSGSETPGTSESATPESSGGSSGGSSGGSSGGS. In some embodiments, the linker is 64 amino acids in length. In some embodiments, the linker comprises the amino acid sequence SGGSSGGSSGSETPGTSESATPESSGGSSGGSSGGSSGGSSGSETPGTSESATPESSGGS SGGS. In some embodiments, the linker is 92 amino acids in length. In some embodiments, the linker comprises the amino acid sequence PGSPAGSPTSTEEGTSESATPESGPGTSTEPSEGSAPGSPAGSPTSTEEGTSTEPSEGSAP GTSTEPSEGSAPGTSESATPESGPGSEPATS.

[0075] By “marker” is meant any protein or polynucleotide having an alteration in expression level or activity that is associated with a disease or disorder.

[0076] The term “mutation,” as used herein, refers to a substitution of a residue within a sequence, e.g., a nucleic acid or amino acid sequence, with another residue, or a deletion or insertion of one or more residues within a sequence. Mutations are typically described herein by identifying the original residue followed by the position of the residue within the sequence and by the identity of the newly substituted residue. Various methods for making the amino acid substitutions (mutations) provided herein are well known in the art, and are provided by, for example, Green and Sambrook, Molecular Cloning: A Laboratory Manual (4th ed., Cold Spring Harbor Laboratory Press, Cold Spring Harbor, N.Y. (2012)). In some embodiments, the presently disclosed base editors can efficiently generate an “intended mutation”, such as a point mutation, in a nucleic acid (e.g., a nucleic acid within a genome of a subject) without generating a significant number of unintended mutations, such as unintended point mutations. In some embodiments, an intended mutation is a mutation that is generated by a specific base editor (e.g., cytidine base editor or adenosine base editor) bound to a guide polynucleotide (e.g., gRNA), specifically designed to generate the intended mutation.

[0077] In general, mutations made or identified in a sequence (e.g., an amino acid sequence as described herein) are numbered in relation to a reference (or wild type) sequence, i.e., a sequence that does not contain the mutations. The skilled practitioner in the art would readily understand how to determine the position of mutations in amino acid and nucleic acid sequences relative to a reference sequence.

[0078] The term “non-conservative mutations” involve amino acid substitutions between different groups, for example, lysine for tryptophan, or phenylalanine for serine, etc. In this case, it is preferable for the non-conservative amino acid substitution to not interfere with, or inhibit the biological activity of, the functional variant. The non-conservative amino acid substitution can enhance the biological activity of the functional variant, such that the biological activity of the functional variant is increased as compared to the wild-type protein.

[0079] The term “nuclear localization sequence,” “nuclear localization signal,” or “NLS” refers to an amino acid sequence that promotes import of a protein into the cell nucleus. Nuclear localization sequences are known in the art and described, for example, in Plank et al., International PCT application, PCT/EP2000/011690, filed Nov. 23, 2000, published as WO/2001/038547 on May 31, 2001, the contents of which are incorporated herein by reference for their disclosure of exemplary nuclear localization sequences. In other embodiments, the NLS is an optimized NLS described, for example, by Koblan et al., Nature Biotech. 2018 doi:10.1038/nbt.4172. Optimized sequences useful in the methods of the invention are shown at FIGS. 8A-8F (Koblan et al., supra). In some embodiments, an NLS comprises the amino acid sequence KRTADGSEFESPKKKRKV, KRPAATKKAGQAKKKK, KKTELQTTNAENKTKKL, KRGINDRNFWRGENGRKTR, RKSGKIAAIVVKRPRK, PKKKRKV, or MDSLLMNRRKFLYQFKNVRWAKGRRETYLC.

[0080] The term “nucleobase,” “nitrogenous base,” or “base,” used interchangeably herein, refers to a nitrogen-containing biological compound that forms a nucleoside, which in turn is a component of a nucleotide. The ability of nucleobases to form base pairs and to stack one upon another leads directly to long-chain helical structures such as ribonucleic acid (RNA) and deoxyribonucleic acid (DNA). Five nucleobases—adenine (A), cytosine (C), guanine (G), thymine (T), and uracil (U)—are called primary or canonical. Adenine and guanine are derived from purine, and cytosine, uracil, and thymine are derived from pyrimidine. DNA and RNA can also contain other (non-primary) bases that are modified. Non-limiting exemplary modified nucleobases can include hypoxanthine, xanthine, 7-methylguanine, 5,6-dihydrouracil, 5-methylcytosine (m5C), and 5-hydromethylcytosine. Hypoxanthine and xanthine can be created through mutagen presence, both of them through deamination (replacement of the amine group with a carbonyl group). Hypoxanthine can be modified from adenine. Xanthine can be modified from guanine. Uracil can result from deamination of cytosine. A “nucleoside” consists of a nucleobase and a five carbon sugar (either ribose or deoxyribose). Examples of a nucleoside include adenosine, guanosine, uridine, cytidine, 5-methyluridine (m5U), deoxyadenosine, deoxyguanosine, thymidine, deoxyuridine, and deoxycytidine. Examples of a nucleoside with a modified nucleobase includes inosine (I), xanthosine (X), 7-methylguanosine (m7G), dihydrouridine (D), 5-methylcytidine (m5C), and pseudouridine (Ψ). A “nucleotide” consists of a nucleobase, a five carbon sugar (either ribose or deoxyribose), and at least one phosphate group.

[0081] The terms “nucleic acid” and “nucleic acid molecule,” as used herein, refer to a compound comprising a nucleobase and an acidic moiety, e.g., a nucleoside, a nucleotide, or a polymer of nucleotides. Typically, polymeric nucleic acids, e.g., nucleic acid molecules comprising three or more nucleotides are linear molecules, in which adjacent nucleotides are linked to each other via a phosphodiester linkage. In some embodiments, “nucleic acid” refers to individual nucleic acid residues (e.g., nucleotides and/or nucleosides). In some embodiments, “nucleic acid” refers to an oligonucleotide chain comprising three or more individual nucleotide residues. As used herein, the terms “oligonucleotide”, “polynucleotide”, and “polynucleic acid” can be used interchangeably to refer to a polymer of nucleotides (e.g., a string of at least three nucleotides). In some embodiments, “nucleic acid” encompasses RNA as well as single and/or double-stranded DNA. Nucleic acids can be naturally occurring, for example, in the context of a genome, a transcript, mRNA, tRNA, rRNA, siRNA, snRNA, a plasmid, cosmid, chromosome, chromatid, or other naturally occurring nucleic acid molecules. On the other hand, a nucleic acid molecule can be a non-naturally occurring molecule, e.g., a recombinant DNA or RNA, an artificial chromosome, an engineered genome, or fragment thereof, or a synthetic DNA, RNA, DNA/RNA hybrid, or including non-naturally occurring nucleotides or nucleosides. Furthermore, the terms “nucleic acid”, “DNA”, “RNA”, and/or similar terms include nucleic acid analogs, e.g., analogs having other than a phosphodiester backbone. Nucleic acids can be purified from natural sources, produced using recombinant expression systems and optionally purified, chemically synthesized, etc. Where appropriate, e.g., in the case of chemically synthesized molecules, nucleic acids can comprise nucleoside analogs such as analogs having chemically modified bases or sugars, and backbone modifications. A nucleic acid sequence is presented in the 5′ to 3′ direction unless otherwise indicated. In some embodiments, a nucleic acid is or comprises natural nucleosides (e.g., adenosine, thymidine, guanosine, cytidine, uridine, deoxyadenosine, deoxythymidine, deoxyguanosine, and deoxycytidine); nucleoside analogs (e.g., 2-aminoadenosine, 2-thiothymidine, inosine, pyrrolopyrimidine, 3-methyl adenosine, 5-methylcytidine, 2-aminoadenosine, C5-bromouridine, C5-fluorouridine, C5-iodouridine, C5-propynyl-uridine, C5-propynyl-cytidine, C5-methylcytidine, 2-aminoadenosine, 7-deazaadenosine, 7-deazaguanosine, 8-oxoadenosine, 8-oxoguanosine, O⁶-methylguanine, and 2-thiocytidine); chemically modified bases; biologically modified bases (e.g., methylated bases); intercalated bases; modified sugars (e.g., 2′-fluororibose, ribose, 2′-deoxyribose, arabinose, and hexose); and/or modified phosphate groups (e.g., phosphorothioates and 5′-N-phosphoramidite linkages).

[0082] The term “nucleic acid programmable DNA binding protein” or “napDNAbp” may be used interchangeably with “polynucleotide programmable nucleotide binding domain” to refer to a protein that associates with a nucleic acid (e.g., DNA or RNA), such as a guide nucleic acid or guide polynucleotide (e.g., gRNA), that guides the napDNAbp to a specific nucleic acid sequence. In some embodiments, the polynucleotide programmable nucleotide binding domain is a polynucleotide programmable DNA binding domain. In some embodiments, the polynucleotide programmable nucleotide binding domain is a polynucleotide programmable RNA binding domain. In some embodiments, the polynucleotide programmable nucleotide binding domain is a Cas9 protein. A Cas9 protein can associate with a guide RNA that guides the Cas9 protein to a specific DNA sequence that is complementary to the guide RNA. In some embodiments, the napDNAbp is a Cas9 domain, for example a nuclease active Cas9, a Cas9 nickase (nCas9), or a nuclease inactive Cas9 (dCas9). Non-limiting examples of nucleic acid programmable DNA binding proteins include, Cas9 (e.g., dCas9 and nCas9), Cas12a/Cpf1, Cas12b/C2c1, Cas12c/C2c3, Cas12d/CasY, Cas12e/CasX, Cas12g, Cas12h, and Cas12i. Non-limiting examples of Cas enzymes include Cas1, Cas1B, Cas2, Cas3, Cas4, Cas5, Cas5d, Cas5t, Cas5h, Cas5a, Cash, Cas7, Cas8, Cas8a, Cas8b, Cas8c, Cas9 (also known as Csn1 or Csx12), Cas10, Cas10d, Cas12a/Cpf1, Cas12b/C2c1, Cas12c/C2c3, Cas12d/CasY, Cas12e/CasX, Cas12g, Cas12h, Cas12i, Csy1, Csy2, Csy3, Csy4, Cse1, Cse2, Cse3, Cse4, Cse5e, Csc1, Csc2, Csa5, Csn1, Csn2, Csm1, Csm2, Csm3, Csm4, Csm5, Csm6, Cmr1, Cmr3, Cmr4, Cmr5, Cmr6, Csb1, Csb2, Csb3, Csx17, Csx14, Csx10, Csx16, CsaX, Csx3, Csx1, Csx1S, Csx11, Csf1, Csf2, CsO, Csf4, Csd1, Csd2, Cst1, Cst2, Csh1, Csh2, Csa1, Csa2, Csa3, Csa4, Csa5, Type II Cas effector proteins, Type V Cas effector proteins, Type VI Cas effector proteins, CARF, DinG, homologues thereof, or modified or engineered versions thereof. Other nucleic acid programmable DNA binding proteins are also within the scope of this disclosure, although they may not be specifically listed in this disclosure. See, e.g., Makarova et al. “Classification and Nomenclature of CRISPR-Cas Systems: Where from Here?” CRISPR J. 2018 October; 1:325-336. doi: 10.1089/crispr.2018.0033; Yan et al., “Functionally diverse type V CRISPR-Cas systems” Science. 2019 Jan. 4; 363(6422):88-91. doi: 10.1126/science.aav7271, the entire contents of each are hereby incorporated by reference.

[0083] The terms “nucleobase editing domain” or “nucleobase editing protein,” as used herein, refers to a protein or enzyme that can catalyze a nucleobase modification in RNA or DNA, such as cytosine (or cytidine) to uracil (or uridine) or thymine (or thymidine), and adenine (or adenosine) to hypoxanthine (or inosine) deaminations, as well as non-templated nucleotide additions and insertions. In some embodiments, the nucleobase editing domain is a deaminase domain (e.g., an adenine deaminase or an adenosine deaminase; or a cytidine deaminase or a cytosine deaminase). In some embodiments, the nucleobase editing domain is more than one deaminase domain (e.g., an adenine deaminase or an adenosine deaminase and a cytidine or a cytosine deaminase). In some embodiments, the nucleobase editing domain can be a naturally occurring nucleobase editing domain. In some embodiments, the nucleobase editing domain can be an engineered or evolved nucleobase editing domain from the naturally occurring nucleobase editing domain. The nucleobase editing domain can be from any organism, such as a bacterium, human, chimpanzee, gorilla, monkey, cow, dog, rat, or mouse.

[0084] As used herein, “obtaining” as in “obtaining an agent” includes synthesizing, purchasing, or otherwise acquiring the agent.

[0085] A “patient” or “subject” as used herein refers to a mammalian subject or individual diagnosed with, at risk of having or developing, or suspected of having or developing a disease or a disorder. In some embodiments, the term “patient” refers to a mammalian subject with a higher than average likelihood of developing a disease or a disorder. Exemplary patients can be humans, non-human primates, cats, dogs, pigs, cattle, cats, horses, camels, llamas, goats, sheep, rodents (e.g., mice, rabbits, rats, or guinea pigs) and other mammalians that can benefit from the therapies disclosed herein. Exemplary human patients can be male and/or female.

[0086] “Patient in need thereof” or “subject in need thereof” is referred to herein as a patient diagnosed with, at risk or having, predetermined to have, or suspected of having a disease or disorder.

[0087] The terms “pathogenic mutation”, “pathogenic variant”, “disease casing mutation”, “disease causing variant”, “deleterious mutation”, or “predisposing mutation” refers to a genetic alteration or mutation that increases an individual's susceptibility or predisposition to a certain disease or disorder. In some embodiments, the pathogenic mutation comprises at least one wild-type amino acid substituted by at least one pathogenic amino acid in a protein encoded by a gene.

[0088] The terms “protein”, “peptide”, “polypeptide”, and their grammatical equivalents are used interchangeably herein, and refer to a polymer of amino acid residues linked together by peptide (amide) bonds. The terms refer to a protein, peptide, or polypeptide of any size, structure, or function. Typically, a protein, peptide, or polypeptide will be at least three amino acids long. A protein, peptide, or polypeptide can refer to an individual protein or a collection of proteins. One or more of the amino acids in a protein, peptide, or polypeptide can be modified, for example, by the addition of a chemical entity such as a carbohydrate group, a hydroxyl group, a phosphate group, a farnesyl group, an isofarnesyl group, a fatty acid group, a linker for conjugation, functionalization, or other modifications, etc. A protein, peptide, or polypeptide can also be a single molecule or can be a multi-molecular complex. A protein, peptide, or polypeptide can be just a fragment of a naturally occurring protein or peptide. A protein, peptide, or polypeptide can be naturally occurring, recombinant, or synthetic, or any combination thereof. The term “fusion protein” as used herein refers to a hybrid polypeptide which comprises protein domains from at least two different proteins. One protein can be located at the amino-terminal (N-terminal) portion of the fusion protein or at the carboxy-terminal (C-terminal) protein thus forming an amino-terminal fusion protein or a carboxy-terminal fusion protein, respectively. A protein can comprise different domains, for example, a nucleic acid binding domain (e.g., the gRNA binding domain of Cas9 that directs the binding of the protein to a target site) and a nucleic acid cleavage domain, or a catalytic domain of a nucleic acid editing protein. In some embodiments, a protein comprises a proteinaceous part, e.g., an amino acid sequence constituting a nucleic acid binding domain, and an organic compound, e.g., a compound that can act as a nucleic acid cleavage agent. In some embodiments, a protein is in a complex with, or is in association with, a nucleic acid, e.g., RNA or DNA. Any of the proteins provided herein can be produced by any method known in the art. For example, the proteins provided herein can be produced via recombinant protein expression and purification, which is especially suited for fusion proteins comprising a peptide linker. Methods for recombinant protein expression and purification are well known, and include those described by Green and Sambrook, Molecular Cloning: A Laboratory Manual (4th ed., Cold Spring Harbor Laboratory Press, Cold Spring Harbor, N.Y. (2012)), the entire contents of which are incorporated herein by reference.

[0089] Polypeptides and proteins disclosed herein (including functional portions and functional variants thereof) can comprise synthetic amino acids in place of one or more naturally-occurring amino acids. Such synthetic amino acids are known in the art, and include, for example, aminocyclohexane carboxylic acid, norleucine, α-amino n-decanoic acid, homoserine, S-acetyl aminomethyl-cysteine, trans-3- and trans-4-hydroxyproline, 4-aminophenylalanine, 4-nitrophenylalanine, 4-chlorophenylalanine, 4-carboxyphenylalanine, β-phenyl serine β-hydroxyphenylalanine, phenylglycine, α-naphthylalanine, cyclohexylalanine, cyclohexylglycine, indoline-2-carboxylic acid, 1,2,3,4-tetrahydroisoquinoline-3-carboxylic acid, aminomalonic acid, aminomalonic acid monoamide, N′-benzyl-N′-methyl-lysine, N′,N′-dibenzyl-lysine, 6-hydroxylysine, ornithine, α-aminocyclopentane carboxylic acid, α-aminocyclohexane carboxylic acid, α-aminocycloheptane carboxylic acid, α-(2-amino-2-norbornane)-carboxylic acid, α,γ-diaminobutyric acid, α,β-diaminopropionic acid, homophenylalanine, and α-tert-butylglycine. The polypeptides and proteins can be associated with post-translational modifications of one or more amino acids of the polypeptide constructs. Non-limiting examples of post-translational modifications include phosphorylation, acylation including acetylation and formylation, glycosylation (including N-linked and O-linked), amidation, hydroxylation, alkylation including methylation and ethylation, ubiquitylation, addition of pyrrolidone carboxylic acid, formation of disulfide bridges, sulfation, myristoylation, palmitoylation, isoprenylation, farnesylation, geranylation, glypiation, lipoylation and iodination.

[0090] The term “recombinant” as used herein in the context of proteins or nucleic acids refers to proteins or nucleic acids that do not occur in nature, but are the product of human engineering. For example, in some embodiments, a recombinant protein or nucleic acid molecule comprises an amino acid or nucleotide sequence that comprises at least one, at least two, at least three, at least four, at least five, at least six, or at least seven mutations as compared to any naturally occurring sequence.

[0091] By “reduces” is meant a negative alteration of at least 10%, 25%, 50%, 75%, or 100%.

[0092] By “reference” is meant a standard or control condition. In one embodiment, the reference is a wild-type or healthy cell. In other embodiments and without limitation, a reference is an untreated cell that is not subjected to a test condition, or is subjected to placebo or normal saline, medium, buffer, and/or a control vector that does not harbor a polynucleotide of interest.

[0093] A “reference sequence” is a defined sequence used as a basis for sequence comparison. A reference sequence may be a subset of or the entirety of a specified sequence; for example, a segment of a full-length cDNA or gene sequence, or the complete cDNA or gene sequence. For polypeptides, the length of the reference polypeptide sequence will generally be at least about 16 amino acids, at least about 20 amino acids, at least about 25 amino acids, about 35 amino acids, about 50 amino acids, or about 100 amino acids. For nucleic acids, the length of the reference nucleic acid sequence will generally be at least about 50 nucleotides, at least about 60 nucleotides, at least about 75 nucleotides, about 100 nucleotides or about 300 nucleotides or any integer thereabout or therebetween. In some embodiments, a reference sequence is a wild-type sequence of a protein of interest. In other embodiments, a reference sequence is a polynucleotide sequence encoding a wild-type protein.

[0094] The term “RNA-programmable nuclease,” and “RNA-guided nuclease” are used with (e.g., binds or associates with) one or more RNA(s) that is not a target for cleavage. In some embodiments, an RNA-programmable nuclease, when in a complex with an RNA, may be referred to as a nuclease:RNA complex. Typically, the bound RNA(s) is referred to as a guide RNA (gRNA). In some embodiments, the RNA-programmable nuclease is the (CRISPR-associated system) Cas9 endonuclease, for example, Cas9 (Csn1) from Streptococcus pyogenes (See, e.g., “Complete genome sequence of an M1 strain of Streptococcus pyogenes.” Ferretti J. J., McShan W. M., Ajdic D. J., Savic D. J., Savic G., Lyon K., Primeaux C, Sezate S., Suvorov A. N., Kenton S., Lai H. S., Lin S. P., Qian Y., Jia H. G., Najar F. Z., Ren Q., Zhu H., Song L., White J., Yuan X., Clifton S. W., Roe B. A., McLaughlin R. E., Proc. Natl. Acad. Sci. U.S.A. 98:4658-4663(2001); “CRISPR RNA maturation by trans-encoded small RNA and host factor RNase III.” Deltcheva E., Chylinski K., Sharma C M., Gonzales K., Chao Y., Pirzada Z. A., Eckert M. R., Vogel J., Charpentier E., Nature 471:602-607(2011).

[0095] The term “single nucleotide polymorphism (SNP)” is a variation in a single nucleotide that occurs at a specific position in the genome, where each variation is present to some appreciable degree within a population (e.g., >1%). For example, at a specific base position in the human genome, the C nucleotide can appear in most individuals, but in a minority of individuals, the position is occupied by an A. This means that there is a SNP at this specific position, and the two possible nucleotide variations, C or A, are said to be alleles for this position. SNPs underlie differences in susceptibility to disease. The severity of illness and the way our body responds to treatments are also manifestations of genetic variations. SNPs can fall within coding regions of genes, non-coding regions of genes, or in the intergenic regions (regions between genes). In some embodiments, SNPs within a coding sequence do not necessarily change the amino acid sequence of the protein that is produced, due to degeneracy of the genetic code. SNPs in the coding region are of two types: synonymous and nonsynonymous SNPs. Synonymous SNPs do not affect the protein sequence, while nonsynonymous SNPs change the amino acid sequence of protein. The nonsynonymous SNPs are of two types: missense and nonsense. SNPs that are not in protein-coding regions can still affect gene splicing, transcription factor binding, messenger RNA degradation, or the sequence of noncoding RNA. Gene expression affected by this type of SNP is referred to as an eSNP (expression SNP) and can be upstream or downstream from the gene. A single nucleotide variant (SNV) is a variation in a single nucleotide without any limitations of frequency and can arise in somatic cells. A somatic single nucleotide variation can also be called a single-nucleotide alteration.

[0096] By “specifically binds” is meant a nucleic acid molecule, polypeptide, or complex thereof (e.g., a nucleic acid programmable DNA binding protein and guide nucleic acid), compound, or molecule that recognizes and binds a polypeptide and/or nucleic acid molecule of the invention, but which does not substantially recognize and bind other molecules in a sample, for example, a biological sample.

[0097] Nucleic acid molecules useful in the methods of the invention include any nucleic acid molecule that encodes a polypeptide of the invention or a fragment thereof. Such nucleic acid molecules need not be 100% identical with an endogenous nucleic acid sequence, but will typically exhibit substantial identity. Polynucleotides having “substantial identity” to an endogenous sequence are typically capable of hybridizing with at least one strand of a double-stranded nucleic acid molecule. Nucleic acid molecules useful in the methods of the invention include any nucleic acid molecule that encodes a polypeptide of the invention or a fragment thereof. Such nucleic acid molecules need not be 100% identical with an endogenous nucleic acid sequence, but will typically exhibit substantial identity. Polynucleotides having “substantial identity” to an endogenous sequence are typically capable of hybridizing with at least one strand of a double-stranded nucleic acid molecule. By “hybridize” is meant pair to form a double-stranded molecule between complementary polynucleotide sequences (e.g., a gene described herein), or portions thereof, under various conditions of stringency. (See, e.g., Wahl, G. M. and S. L. Berger (1987) Methods Enzymol. 152:399; Kimmel, A. R. (1987) Methods Enzymol. 152:507).

[0098] For example, stringent salt concentration will ordinarily be less than about 750 mM NaCl and 75 mM trisodium citrate, preferably less than about 500 mM NaCl and 50 mM trisodium citrate, and more preferably less than about 250 mM NaCl and 25 mM trisodium citrate. Low stringency hybridization can be obtained in the absence of organic solvent, e.g., formamide, while high stringency hybridization can be obtained in the presence of at least about 35% formamide, and more preferably at least about 50% formamide. Stringent temperature conditions will ordinarily include temperatures of at least about 30° C., more preferably of at least about 37° C., and most preferably of at least about 42° C. Varying additional parameters, such as hybridization time, the concentration of detergent, e.g., sodium dodecyl sulfate (SDS), and the inclusion or exclusion of carrier DNA, are well known to those skilled in the art. Various levels of stringency are accomplished by combining these various conditions as needed. In a preferred: embodiment, hybridization will occur at 30° C. in 750 mM NaCl, 75 mM trisodium citrate, and 1% SDS. In a more preferred embodiment, hybridization will occur at 37° C. in 500 mM NaCl, 50 mM trisodium citrate, 1% SDS, 35% formamide, and 100 μg/ml denatured salmon sperm DNA (ssDNA). In a most preferred embodiment, hybridization will occur at 42° C. in 250 mM NaCl, 25 mM trisodium citrate, 1% SDS, 50% formamide, and 200 μg/ml ssDNA. Useful variations on these conditions will be readily apparent to those skilled in the art.

[0099] For most applications, washing steps that follow hybridization will also vary in stringency. Wash stringency conditions can be defined by salt concentration and by temperature. As above, wash stringency can be increased by decreasing salt concentration or by increasing temperature. For example, stringent salt concentration for the wash steps will preferably be less than about 30 mM NaCl and 3 mM trisodium citrate, and most preferably less than about 15 mM NaCl and 1.5 mM trisodium citrate. Stringent temperature conditions for the wash steps will ordinarily include a temperature of at least about 25° C., more preferably of at least about 42° C., and even more preferably of at least about 68° C. In an embodiment, wash steps will occur at 25° C. in 30 mM NaCl, 3 mM trisodium citrate, and 0.1% SDS. In another embodiment, wash steps will occur at 42 C in 15 mM NaCl, 1.5 mM trisodium citrate, and 0.1% SDS. In a more preferred embodiment, wash steps will occur at 68° C. in 15 mM NaCl, 1.5 mM trisodium citrate, and 0.1% SDS. Additional variations on these conditions will be readily apparent to those skilled in the art. Hybridization techniques are well known to those skilled in the art and are described, for example, in Benton and Davis (Science 196:180, 1977); Grunstein and Hogness (Proc. Natl. Acad. Sci., USA 72:3961, 1975); Ausubel et al. (Current Protocols in Molecular Biology, Wiley Interscience, New York, 2001); Berger and Kimmel (Guide to Molecular Cloning Techniques, 1987, Academic Press, New York); and Sambrook et al., Molecular Cloning: A Laboratory Manual, Cold Spring Harbor Laboratory Press, New York.

[0100] By “split” is meant divided into two or more fragments.

[0101] A “split Cas9 protein” or “split Cas9” refers to a Cas9 protein that is provided as an N-terminal fragment and a C-terminal fragment encoded by two separate nucleotide sequences. The polypeptides corresponding to the N-terminal portion and the C-terminal portion of the Cas9 protein may be spliced to form a “reconstituted” Cas9 protein. In particular embodiments, the Cas9 protein is divided into two fragments within a disordered region of the protein, e.g., as described in Nishimasu et al., Cell, Volume 156, Issue 5, pp. 935-949, 2014, or as described in Jiang et al. (2016) Science 351: 867-871. PDB file: 5F9R, each of which is incorporated herein by reference. In some embodiments, the protein is divided into two fragments at any C, T, A, or S within a region of SpCas9 between about amino acids A292-G364, F445-K483, or E565-T637, or at corresponding positions in any other Cas9, Cas9 variant (e.g., nCas9, dCas9), or other napDNAbp. In some embodiments, protein is divided into two fragments at SpCas9 T310, T313, A456, S469, or C574. In some embodiments, the process of dividing the protein into two fragments is referred to as “splitting” the protein.

[0102] In other embodiments, the N-terminal portion of the Cas9 protein comprises amino acids 1-573 or 1-637 S. pyogenes Cas9 wild-type (SpCas9) (NCBI Reference Sequence: NC_002737.2, Uniprot Reference Sequence: Q99ZW2) and the C-terminal portion of the Cas9 protein comprises a portion of amino acids 574-1368 or 638-1368 of SpCas9 wild-type.

[0103] The C-terminal portion of the split Cas9 can be joined with the N-terminal portion of the split Cas9 to form a complete Cas9 protein. In some embodiments, the C-terminal portion of the Cas9 protein starts from where the N-terminal portion of the Cas9 protein ends. As such, in some embodiments, the C-terminal portion of the split Cas9 comprises a portion of amino acids (551-651)-1368 of spCas9. “(551-651)-1368” means starting at an amino acid between amino acids 551-651 (inclusive) and ending at amino acid 1368. For example, the C-terminal portion of the split Cas9 may comprise a portion of any one of amino acid 551-1368, 552-1368, 553-1368, 554-1368, 555-1368, 556-1368, 557-1368, 558-1368, 559-1368, 560-1368, 561-1368, 562-1368, 563-1368, 564-1368, 565-1368, 566-1368, 567-1368, 568-1368, 569-1368, 570-1368, 571-1368, 572-1368, 573-1368, 574-1368, 575-1368, 576-1368, 577-1368, 578-1368, 579-1368, 580-1368, 581-1368, 582-1368, 583-1368, 584-1368, 585-1368, 586-1368, 587-1368, 588-1368, 589-1368, 590-1368, 591-1368, 592-1368, 593-1368, 594-1368, 595-1368, 596-1368, 597-1368, 598-1368, 599-1368, 600-1368, 601-1368, 602-1368, 603-1368, 604-1368, 605-1368, 606-1368, 607-1368, 608-1368, 609-1368, 610-1368, 611-1368, 612-1368, 613-1368, 614-1368, 615-1368, 616-1368, 617-1368, 618-1368, 619-1368, 620-1368, 621-1368, 622-1368, 623-1368, 624-1368, 625-1368, 626-1368, 627-1368, 628-1368, 629-1368, 630-1368, 631-1368, 632-1368, 633-1368, 634-1368, 635-1368, 636-1368, 637-1368, 638-1368, 639-1368, 640-1368, 641-1368, 642-1368, 643-1368, 644-1368, 645-1368, 646-1368, 647-1368, 648-1368, 649-1368, 650-1368, or 651-1368 of spCas9. In some embodiments, the C-terminal portion of the split Cas9 protein comprises a portion of amino acids 574-1368 or 638-1368 of SpCas9.

[0104] By “subject” is meant a mammal, including, but not limited to, a human or non-human mammal, such as a non-human primate (monkey), bovine, equine, canine, ovine, or feline.

[0105] By “substantially identical” is meant a polypeptide or nucleic acid molecule exhibiting at least 50% identity to a reference amino acid sequence (for example, any one of the amino acid sequences described herein) or nucleic acid sequence (for example, any one of the nucleic acid sequences described herein). In some embodiments, such a sequence is at least 60%, 80%, 85%, 90%, 95% or even 99% identical at the amino acid level or nucleic acid level to the sequence used for comparison.

[0106] Sequence identity is typically measured using sequence analysis software (for example, Sequence Analysis Software Package of the Genetics Computer Group, University of Wisconsin Biotechnology Center, 1710 University Avenue, Madison, Wis. 53705, BLAST, BESTFIT, GAP, or PILEUP/PRETTYBOX programs). Such software matches identical or similar sequences by assigning degrees of homology to various substitutions, deletions, and/or other modifications. Conservative substitutions typically include substitutions within the following groups: glycine, alanine; valine, isoleucine, leucine; aspartic acid, glutamic acid, asparagine, glutamine; serine, threonine; lysine, arginine; and phenylalanine, tyrosine. In an exemplary approach to determining the degree of identity, a BLAST program may be used, with a probability score between e⁻³ and e⁻¹⁰⁰ indicating a closely related sequence.

COBALT is used, for example, with the following parameters:
[0107] a) alignment parameters: Gap penalties-11,-1 and End-Gap penalties-5,-1,
[0108] b) CDD Parameters: Use RPS BLAST on; Blast E-value 0.003; Find Conserved columns and Recompute on, and
[0109] c) Query Clustering Parameters: Use query clusters on; Word Size 4; Max cluster distance 0.8; Alphabet Regular.
   EMBOSS Needle is used, for example, with the following parameters:
[0110] a) Matrix: BLOSUM62;
[0111] b) GAP OPEN: 10;
[0112] c) GAP EXTEND: 0.5;
[0113] d) OUTPUT FORMAT: pair;
[0114] e) END GAP PENALTY: false;
[0115] f) END GAP OPEN: 10; and
[0116] g) END GAP EXTEND: 0.5.

[0117] The term “target site” refers to a sequence within a nucleic acid molecule that is modified by a nucleobase editor. In one embodiment, the target site is deaminated by a deaminase or a fusion protein comprising a deaminase (e.g., a dCas9-adenosine deaminase fusion protein or a multi-effector base editor disclosed herein).

[0118] Because RNA-programmable nucleases (e.g., Cas9) use RNA:DNA hybridization to target DNA cleavage sites, these proteins are able to be targeted, in principle, to any sequence specified by the guide RNA. Methods of using RNA-programmable nucleases, such as Cas9, for site-specific cleavage (e.g., to modify a genome) are known in the art (see e.g., Cong, L. et ah, Multiplex genome engineering using CRISPR/Cas systems. Science 339, 819-823 (2013); Mali, P. et ah, RNA-guided human genome engineering via Cas9. Science 339, 823-826 (2013); Hwang, W. Y. et ah, Efficient genome editing in zebrafish using a CRISPR-Cas system. Nature biotechnology 31, 227-229 (2013); Jinek, M. et ah, RNA-programmed genome editing in human cells. eLife 2, e00471 (2013); Dicarlo, J. E. et ah, Genome engineering in Saccharomyces cerevisiae using CRISPR-Cas systems. Nucleic acids research (2013); Jiang, W. et ah RNA-guided editing of bacterial genomes using CRISPR-Cas systems. Nature biotechnology 31, 233-239 (2013); the entire contents of each of which are incorporated herein by reference).

[0119] As used herein, the terms “treat,” treating,” “treatment,” and the like refer to reducing or ameliorating a disorder and/or symptoms associated therewith or obtaining a desired pharmacologic and/or physiologic effect. It will be appreciated that, although not precluded, treating a disorder or condition does not require that the disorder, condition or symptoms associated therewith be completely eliminated. In some embodiments, the effect is therapeutic, i.e., without limitation, the effect partially or completely reduces, diminishes, abrogates, abates, alleviates, decreases the intensity of, or cures a disease and/or adverse symptom attributable to the disease. In some embodiments, the effect is preventative, i.e., the effect protects or prevents an occurrence or reoccurrence of a disease or condition. To this end, the presently disclosed methods comprise administering a therapeutically effective amount of a compositions as described herein.

[0120] By “uracil glycosylase inhibitor” or “UGI” is meant an agent that inhibits the uracil-excision repair system. In one embodiment, the agent is a protein or fragment thereof that binds a host uracil-DNA glycosylase and prevents removal of uracil residues from DNA. In an embodiment, a UGI is a protein, a fragment thereof, or a domain that is capable of inhibiting a uracil-DNA glycosylase base-excision repair enzyme. In some embodiments, a UGI domain comprises a wild-type UGI or a modified version thereof. In some embodiments, a UGI domain comprises a fragment of the exemplary amino acid sequence set forth below. In some embodiments, a UGI fragment comprises an amino acid sequence that comprises at least 60%, at least 65%, at least 70%, at least 75%, at least 80%, at least 85%, at least 90%, at least 95%, at least 96%, at least 97%, at least 98%, at least 99%, or 100% of the exemplary UGI sequence provided below. In some embodiments, a UGI comprises an amino acid sequence that is homologous to the exemplary UGI amino acid sequence or fragment thereof, as set forth below. In some embodiments, the UGI, or a portion thereof, is at least 70%, at least 75%, at least 80%, at least 85%, at least 90%, at least 95%, at least 96%, at least 97%, at least 98%, at least 99%, at least 99.5%, at least 99.9%, or 100% identical to a wild type UGI or a UGI sequence, or portion thereof, as set forth below. An exemplary UGI comprises an amino acid sequence as follows:

>sp|P14739IUNGI_BPPB2 Uracil-DNA glycosylase inhibitor

MTNLSDIIEKETGKQLVIQESILMLPEEVEEVIGNKPESDILVHTAYDEST
DENVMLLT S D APE YKPW ALVIQDS NGENKIKML.

[0121] Ranges provided herein are understood to be shorthand for all of the values within the range. For example, a range of 1 to 50 is understood to include any number, combination of numbers, or sub-range from the group consisting 1, 2, 3, 4, 5, 6, 7, 8, 9, 10, 11, 12, 13, 14, 15, 16, 17, 18, 19, 20, 21, 22, 23, 24, 25, 26, 27, 28, 29, 30, 31, 32, 33, 34, 35, 36, 37, 38, 39, 40, 41, 42, 43, 44, 45, 46, 47, 48, 49, or 50.

[0122] The recitation of a listing of chemical groups in any definition of a variable herein includes definitions of that variable as any single group or combination of listed groups. The recitation of an embodiment for a variable or aspect herein includes that embodiment as any single embodiment or in combination with any other embodiments or portions thereof.

[0123] Any compositions or methods provided herein can be combined with one or more of any of the other compositions and methods provided herein.

[0124] The description and examples herein illustrate embodiments of the present disclosure in detail. It is to be understood that this disclosure is not limited to the particular embodiments described herein and as such can vary. Those of skill in the art will recognize that there are numerous variations and modifications of this disclosure, which are encompassed within its scope.

[0125] All terms are intended to be understood as they would be understood by a person skilled in the art. Unless defined otherwise, all technical and scientific terms used herein have the same meaning as commonly understood by one of ordinary skill in the art to which the disclosure pertains.

[0126] The practice of some embodiments disclosed herein employ, unless otherwise indicated, conventional techniques of immunology, biochemistry, chemistry, molecular biology, microbiology, cell biology, genomics and recombinant DNA, which are within the skill of the art. See for example Sambrook and Green, Molecular Cloning: A Laboratory Manual, 4th Edition (2012); the series Current Protocols in Molecular Biology (F. M. Ausubel, et al. eds.); the series Methods In Enzymology (Academic Press, Inc.), PCR 2: A Practical Approach (M. J. MacPherson, B. D. Hames and G. R. Taylor eds. (1995)), Harlow and Lane, eds. (1988) Antibodies, A Laboratory Manual, and Culture of Animal Cells: A Manual of Basic Technique and Specialized Applications, 6th Edition (R. I. Freshney, ed. (2010)).

[0127] Although various features of the present disclosure can be described in the context of a single embodiment, the features can also be provided separately or in any suitable combination. Conversely, although the present disclosure can be described herein in the context of separate embodiments for clarity, the present disclosure can also be implemented in a single embodiment. The section headings used herein are for organizational purposes only and are not to be construed as limiting the subject matter described.

[0128] The features of the present disclosure are set forth with particularity in the appended claims. A better understanding of the features and advantages of the present will be obtained by reference to the following detailed description that sets forth illustrative embodiments, in which the principles of the disclosure are utilized, and in view of the accompanying drawings as described hereinbelow.

### BRIEF DESCRIPTION OF THE DRAWINGS

[0129] FIG. 1 shows a comparison of the base modifying activity of the conventional base editor ABE7.10 (top) relative to pNMG-B79 (middle), which is a multi-effector nucleobase editor, relative to the untreated sequence (bottom).

[0130] FIG. 2 provides schematics showing three versions of a multi-effector nucleobase editors.

[0131] FIGS. 3A and 3B. FIG. 3A provides schematics of the multi-effector nucleobase editors used to modify genomic DNA shown in FIG. 3B. FIG. 3B shows a comparison of the base modifying activity of the multi-effector nucleobase editors shown in FIG. 3A.

[0132] FIGS. 4A-4C. FIG. 4A provides schematics showing the domains present in the multi-effector nucleobase editors which were used to modify an HBG1 site as shown in FIGS. 4B and 4C.

[0133] FIGS. 5A-5C. FIG. 5A shows a comparison of the base editing activity of the conventional base editor ABE7.10 (top) relative to pNMG-B79 (middle) relative to the untreated sequence (bottom). A schematic of the pNMG-B79 multi-effector nucleobase editor is also provided. FIG. 5B shows exemplary reads of the sequencing results summarized in FIG. 5A. FIG. 5C shows sequencing results for an experiment comparing the activity of conventional base editor ABE7.10 (top) relative to pNMG-B79.

[0134] FIG. 6 shows a comparison of indel rates between ABE7.10 and pNMG-B79.

[0135] FIG. 7A and FIG. 7B show a comparison of the base editing activity of the conventional base editor ABE7.10 (top) relative to the designated multi-effector nucleobase editors and untreated sequence at the bottom of FIG. 7B. The percent of indels generated is shown at the far right of the figure.

[0136] FIGS. 8A-8F. FIGS. 8A and 8B are, respectively, a plasmid map and codon optimized nucleotide sequence for pCMV_ABEmax. FIGS. 8C and 8D are, respectively, a plasmid map and codon optimized nucleotide sequence for pCMV_AncBE4max. FIGS. 8E and 8F are, respectively, a plasmid map and codon optimized nucleotide sequence for pCMV_BE4max.

### DETAILED DESCRIPTION OF THE DISCLOSURE

[0137] The invention features multi-effector nucleobase editors and methods of using them to generate modifications in target nucleobase sequences. The invention is based, at least in part, on the surprising discovery that a fusion protein comprising a cytidine deaminase domain, nCas9 domain, and adenosine deaminase domain is capable of introducing dual base edits in a target sequence. In particular, a single polypeptide multi-effector nucleobase editor converted A to G and C to T in DNA when expressed in mammalian cells, for example, HEK293T cells.

[0138] The multi-effector nucleobase editors of the invention are fusion proteins that are useful inter alia for targeted editing of nucleic acid sequences. Such fusion proteins may be used for targeted editing of DNA in vitro, e.g., to introduce mutations that alter the activity of a regulatory sequence, for example, or that alter the activity of an encoded protein, such as a complementarity determining region (CDR) of an antibody.

### Nucleobase Editor

[0139] Disclosed herein is a base editor or a nucleobase editor for editing, modifying or altering a target nucleotide sequence of a polynucleotide. Described herein is a nucleobase editor or a base editor comprising a polynucleotide programmable nucleotide binding domain and a nucleobase editing domain. In a particular embodiment, a multi-effector nucleobase editor is provided, which comprises one or more (e.g., two) of an adenosine deaminase domain and a cytidine deaminase domain, as well as a DNA glycosylase domain, wherein the aforementioned domains are fused to a polynucleotide binding domain, thereby forming a nucleobase editor capable of inducing changes at multiple different bases within a nucleic acid molecule. A polynucleotide programmable nucleotide binding domain, when in conjunction with a bound guide polynucleotide (e.g., gRNA), can specifically bind to a target polynucleotide sequence (i.e., via complementary base pairing between bases of the bound guide nucleic acid and bases of the target polynucleotide sequence) and thereby localize the base editor to the target nucleic acid sequence desired to be edited. In some embodiments, the target polynucleotide sequence comprises single-stranded DNA or double-stranded DNA. In some embodiments, the target polynucleotide sequence comprises RNA. In some embodiments, the target polynucleotide sequence comprises a DNA-RNA hybrid.

### Polynucleotide Programmable Nucleotide Binding Domain

[0140] It should be appreciated that polynucleotide programmable nucleotide binding domains can also include nucleic acid programmable proteins that bind RNA. For example, the polynucleotide programmable nucleotide binding domain can be associated with a nucleic acid that guides the polynucleotide programmable nucleotide binding domain to an RNA. Other nucleic acid programmable DNA binding proteins are also within the scope of this disclosure, although they are not specifically listed in this disclosure.

[0141] A polynucleotide programmable nucleotide binding domain of a base editor can itself comprise one or more domains. For example, a polynucleotide programmable nucleotide binding domain can comprise one or more nuclease domains. In some embodiments, the nuclease domain of a polynucleotide programmable nucleotide binding domain can comprise an endonuclease or an exonuclease. Herein the term “exonuclease” refers to a protein or polypeptide capable of digesting a nucleic acid (e.g., RNA or DNA) from free ends, and the term “endonuclease” refers to a protein or polypeptide capable of catalyzing (e.g., cleaving) internal regions in a nucleic acid (e.g., DNA or RNA). In some embodiments, an endonuclease can cleave a single strand of a double-stranded nucleic acid. In some embodiments, an endonuclease can cleave both strands of a double-stranded nucleic acid molecule. In some embodiments a polynucleotide programmable nucleotide binding domain can be a deoxyribonuclease. In some embodiments a polynucleotide programmable nucleotide binding domain can be a ribonuclease.

[0142] In some embodiments, a nuclease domain of a polynucleotide programmable nucleotide binding domain can cut zero, one, or two strands of a target polynucleotide. In some cases, the polynucleotide programmable nucleotide binding domain can comprise a nickase domain. Herein the term “nickase” refers to a polynucleotide programmable nucleotide binding domain comprising a nuclease domain that is capable of cleaving only one strand of the two strands in a duplexed nucleic acid molecule (e.g., DNA). In some embodiments, a nickase can be derived from a fully catalytically active (e.g., natural) form of a polynucleotide programmable nucleotide binding domain by introducing one or more mutations into the active polynucleotide programmable nucleotide binding domain. For example, where a polynucleotide programmable nucleotide binding domain comprises a nickase domain derived from Cas9, the Cas9-derived nickase domain can include a D10A mutation and a histidine at position 840. In such cases, the residue H840 retains catalytic activity and can thereby cleave a single strand of the nucleic acid duplex. In another example, a Cas9-derived nickase domain can comprise an H840A mutation, while the amino acid residue at position 10 remains a D. In some embodiments, a nickase can be derived from a fully catalytically active (e.g., natural) form of a polynucleotide programmable nucleotide binding domain by removing all or a portion of a nuclease domain that is not required for the nickase activity. For example, where a polynucleotide programmable nucleotide binding domain comprises a nickase domain derived from Cas9, the Cas9-derived nickase domain can comprise a deletion of all or a portion of the RuvC domain or the HNH domain.

[0143] The amino acid sequence of an exemplary catalytically active Cas9 is as follows:

MDKKYSIGLDIGTNSVGWAVITDEYKVPSKKFKVLGNTDRHSIKKNLIGALLFDSGETAEAT
RLKRTARRRYTRRKNRICYLQEIFSNEMAKVDDSFFHRLEESFLVEEDKKHERHPIFGNIVD
EVAYHEKYPTIYHLRKKLVDSTDKADLRLIYLALAHMIKFRGHFLIEGDLNPDNSDVDKLFI
QLVQTYNQLFEENPINASGVDAKAILSARLSKSRRLENLIAQLPGEKKNGLFGNLIALSLGL
TPNFKSNFDLAEDAKLQLSKDTYDDDLDNLLAQIGDQYADLFLAAKNLSDAILLSDILRVNT
EITKAPLSASMIKRYDEHHQDLTLLKALVRQQLPEKYKEIFFDQSKNGYAGYIDGGASQEEF
YKFIKPILEKMDGTEELLVKLNREDLLRKQRTFDNGSIPHQIHLGELHAILRRQEDFYPFLK
DNREKIEKILTFRIPYYVGPLARGNSRFAWMTRKSEETITPWNFEEVVDKGASAQSFIERMT
NFDKNLPNEKVLPKHSLLYEYFTVYNELTKVKYVTEGMRKPAFLSGEQKKAIVDLLFKTNRK
VTVKQLKEDYFKKIECFDSVEISGVEDRFNASLGTYHDLLKIIKDKDFLDNEENEDILEDIV
LTLTLFEDREMIEERLKTYAHLFDDKVMKQLKRRRYTGWGRLSRKLINGIRDKQSGKTILDF
LKSDGFANRNFMQLIHDDSLTFKEDIQKAQVSGQGDSLHEHIANLAGSPAIKKGILQTVKVV
DELVKVMGRHKPENIVIEMARENQTTQKGQKNSRERMKRIEEGIKELGSQILKEHPVENTQL
QNEKLYLYYLQNGRDMYVDQELDINRLSDYDVDHIVPQSFLKDDSIDNKVLTRSDKNRGKSD
NVPSEEVVKKMKNYWRQLLNAKLITQRKFDNLTKAERGGLSELDKAGFIKRQLVETRQITKH
VAQILDSRMNTKYDENDKLIREVKVITLKSKLVSDFRKDFQFYKVREINNYHHAHDAYLNAV
VGTALIKKYPKLESEFVYGDYKVYDVRKMIAKSEQEIGKATAKYFFYSNIMNFFKTEITLAN
GEIRKRPLIETNGETGEIVWDKGRDFATVRKVLSMPQVNIVKKTEVQTGGFSKESILPKRNS
DKLIARKKDWDPKKYGGFDSPTVAYSVLVVAKVEKGKSKKLKSVKELLGITIMERSSFEKNP
IDFLEAKGYKEVKKDLIIKLPKYSLFELENGRKRMLASAGELQKGNELALPSKYVNFLYLAS
HYEKLKGSPEDNEQKQLFVEQHKHYLDEIIEQISEFSKRVILADANLDKVLSAYNKHRDKPI
REQAENIIHLFTLTNLGAPAAFKYFDTTIDRKRYTSTKEVLDATLIHQSITGLYETRIDLSQ
LGGD.

[0144] A base editor comprising a polynucleotide programmable nucleotide binding domain comprising a nickase domain is thus able to generate a single-strand DNA break (nick) at a specific polynucleotide target sequence (e.g., determined by the complementary sequence of a bound guide nucleic acid). In some embodiments, the strand of a nucleic acid duplex target polynucleotide sequence that is cleaved by a base editor comprising a nickase domain (e.g., Cas9-derived nickase domain) is the strand that is not edited by the base editor (i.e., the strand that is cleaved by the base editor is opposite to a strand comprising a base to be edited). In other embodiments, a base editor comprising a nickase domain (e.g., Cas9-derived nickase domain) can cleave the strand of a DNA molecule which is being targeted for editing. In such cases, the non-targeted strand is not cleaved.

[0145] Also provided herein are base editors comprising a polynucleotide programmable nucleotide binding domain which is catalytically dead (i.e., incapable of cleaving a target polynucleotide sequence). Herein the terms “catalytically dead” and “nuclease dead” are used interchangeably to refer to a polynucleotide programmable nucleotide binding domain which has one or more mutations and/or deletions resulting in its inability to cleave a strand of a nucleic acid. In some embodiments, a catalytically dead polynucleotide programmable nucleotide binding domain base editor can lack nuclease activity as a result of specific point mutations in one or more nuclease domains. For example, in the case of a base editor comprising a Cas9 domain, the Cas9 can comprise both a D10A mutation and an H840A mutation. Such mutations inactivate both nuclease domains, thereby resulting in the loss of nuclease activity. In other embodiments, a catalytically dead polynucleotide programmable nucleotide binding domain can comprise one or more deletions of all or a portion of a catalytic domain (e.g., RuvC1 and/or HNH domains). In further embodiments, a catalytically dead polynucleotide programmable nucleotide binding domain comprises a point mutation (e.g., D10A or H840A) as well as a deletion of all or a portion of a nuclease domain.

[0146] Also contemplated herein are mutations capable of generating a catalytically dead polynucleotide programmable nucleotide binding domain from a previously functional version of the polynucleotide programmable nucleotide binding domain. For example, in the case of catalytically dead Cas9 (“dCas9”), variants having mutations other than D10A and H840A are provided, which result in nuclease inactivated Cas9. Such mutations, by way of example, include other amino acid substitutions at D10 and H840, or other substitutions within the nuclease domains of Cas9 (e.g., substitutions in the HNH nuclease subdomain and/or the RuvC1 subdomain). Additional suitable nuclease-inactive dCas9 domains can be apparent to those of skill in the art based on this disclosure and knowledge in the field, and are within the scope of this disclosure. Such additional exemplary suitable nuclease-inactive Cas9 domains include, but are not limited to, D10A/H840A, D10A/D839A/H840A, and D10A/D839A/H840A/N863A mutant domains (See, e.g., Prashant et al., CAS9 transcriptional activators for target specificity screening and paired nickases for cooperative genome engineering. Nature Biotechnology. 2013; 31(9): 833-838, the entire contents of which are incorporated herein by reference).

[0147] Non-limiting examples of a polynucleotide programmable nucleotide binding domain which can be incorporated into a base editor include a CRISPR protein-derived domain, a restriction nuclease, a meganuclease, TAL nuclease (TALEN), and a zinc finger nuclease (ZFN). In some cases, a base editor comprises a polynucleotide programmable nucleotide binding domain comprising a natural or modified protein or portion thereof which via a bound guide nucleic acid is capable of binding to a nucleic acid sequence during CRISPR (i.e., Clustered Regularly Interspaced Short Palindromic Repeats)-mediated modification of a nucleic acid. Such a protein is referred to herein as a “CRISPR protein”. Accordingly, disclosed herein is a base editor comprising a polynucleotide programmable nucleotide binding domain comprising all or a portion of a CRISPR protein (i.e. a base editor comprising as a domain all or a portion of a CRISPR protein, also referred to as a “CRISPR protein-derived domain” of the base editor). A CRISPR protein-derived domain incorporated into a base editor can be modified compared to a wild-type or natural version of the CRISPR protein. For example, as described below a CRISPR protein-derived domain can comprise one or more mutations, insertions, deletions, rearrangements and/or recombinations relative to a wild-type or natural version of the CRISPR protein.

[0148] CRISPR is an adaptive immune system that provides protection against mobile genetic elements (viruses, transposable elements and conjugative plasmids). CRISPR clusters contain spacers, sequences complementary to antecedent mobile elements, and target invading nucleic acids. CRISPR clusters are transcribed and processed into CRISPR RNA (crRNA). In type II CRISPR systems, correct processing of pre-crRNA requires a trans-encoded small RNA (tracrRNA), endogenous ribonuclease 3 (rnc) and a Cas9 protein. The tracrRNA serves as a guide for ribonuclease 3-aided processing of pre-crRNA. Subsequently, Cas9/crRNA/tracrRNA endonucleolytically cleaves linear or circular dsDNA target complementary to the spacer. The target strand not complementary to crRNA is first cut endonucleolytically, and then trimmed 3′-5′ exonucleolytically. In nature, DNA-binding and cleavage typically requires protein and both RNAs. However, single guide RNAs (“sgRNA”, or simply “gNRA”) can be engineered so as to incorporate aspects of both the crRNA and tracrRNA into a single RNA species. See, e.g., Jinek M., Chylinski K., Fonfara I., Hauer M., Doudna J. A., Charpentier E. Science 337:816-821(2012), the entire contents of which is hereby incorporated by reference. Cas9 recognizes a short motif in the CRISPR repeat sequences (the PAM or protospacer adjacent motif) to help distinguish self versus non-self.

[0149] In some embodiments, the methods described herein can utilize an engineered Cas protein. A guide RNA (gRNA) is a short synthetic RNA composed of a scaffold sequence necessary for Cas-binding and a user-defined ˜20 nucleotide spacer that defines the genomic target to be modified. Thus, a skilled artisan can change the genomic target of the Cas protein specificity is partially determined by how specific the gRNA targeting sequence is for the genomic target compared to the rest of the genome.

[0150] In some embodiments, the gRNA scaffold sequence is as follows: GUUUUAGAGC UAGAAAUAGC AAGUUAAAAU AAGGCUAGUC CGUUAUCAAC UUGAAAAAGU GGCACCGAGU CGGUGCUUUU.

[0151] In some embodiments, a CRISPR protein-derived domain incorporated into a base editor is an endonuclease (e.g., deoxyribonuclease or ribonuclease) capable of binding a target polynucleotide when in conjunction with a bound guide nucleic acid. In some embodiments, a CRISPR protein-derived domain incorporated into a base editor is a nickase capable of binding a target polynucleotide when in conjunction with a bound guide nucleic acid. In some embodiments, a CRISPR protein-derived domain incorporated into a base editor is a catalytically dead domain capable of binding a target polynucleotide when in conjunction with a bound guide nucleic acid. In some embodiments, a target polynucleotide bound by a CRISPR protein derived domain of a base editor is DNA. In some embodiments, a target polynucleotide bound by a CRISPR protein-derived domain of a base editor is RNA.

[0152] Cas proteins that can be used herein include class 1 and class 2. Non-limiting examples of Cas proteins include Cas1, Cas1B, Cas2, Cas3, Cas4, Cas5, Cas5d, Cas5t, Cas5h, Cas5a, Cash, Cas7, Cas8, Cas9 (also known as Csn1 or Csx12), Cas10, Csy1, Csy2, Csy3, Csy4, Cse1, Cse2, Cse3, Cse4, Cse5e, Csc1, Csc2, Csa5, Csn1, Csn2, Csm1, Csm2, Csm3, Csm4, Csm5, Csm6, Cmr1, Cmr3, Cmr4, Cmr5, Cmr6, Csb1, Csb2, Csb3, Csx17, Csx14, Csx10, Csx16, CsaX, Csx3, Csx1, Csx1S, Csf1, Csf2, CsO, Csf4, Csd1, Csd2, Cst1, Cst2, Csh1, Csh2, Csa1, Csa2, Csa3, Csa4, Csa5, Cas12a/Cpf1, Cas12b/C2c1, Cas12c/C2c3, Cas12d/CasY, Cas12e/CasX, Cas12g, Cas12h, Cas12i, CARF, DinG, homologues thereof, or modified versions thereof. An unmodified CRISPR enzyme can have DNA cleavage activity, such as Cas9, which has two functional endonuclease domains: RuvC and HNH. A CRISPR enzyme can direct cleavage of one or both strands at a target sequence, such as within a target sequence and/or within a complement of a target sequence. For example, a CRISPR enzyme can direct cleavage of one or both strands within about 1, 2, 3, 4, 5, 6, 7, 8, 9, 10, 15, 20, 25, 50, 100, 200, 500, or more base pairs from the first or last nucleotide of a target sequence.

[0153] A vector that encodes a CRISPR enzyme that is mutated to with respect, to a corresponding wild-type enzyme such that the mutated CRISPR enzyme lacks the ability to cleave one or both strands of a target polynucleotide containing a target sequence can be used. Cas9 can refer to a polypeptide with at least or at least about 50%, 60%, 70%, 80%, 90%, 91%, 92%, 93%, 94%, 95%, 96%, 97%, 98%, 99%, or 100% sequence identity and/or sequence homology to a wild type exemplary Cas9 polypeptide (e.g., Cas9 from S. pyogenes). Cas9 can refer to a polypeptide with at most or at most about 50%, 60%, 70%, 80%, 90%, 91%, 92%, 93%, 94%, 95%, 96%, 97%, 98%, 99%, or 100% sequence identity and/or sequence homology to a wild type exemplary Cas9 polypeptide (e.g., from S. pyogenes). Cas9 can refer to the wild type or a modified form of the Cas9 protein that can comprise an amino acid change such as a deletion, insertion, substitution, variant, mutation, fusion, chimera, or any combination thereof.

[0154] In some embodiments, a CRISPR protein-derived domain of a base editor can include all or a portion of Cas9 from Corynebacterium ulcerans (NCBI Refs: NC_015683.1, NC_017317.1); Corynebacterium diphtheria (NCBI Refs: NC_016782.1, NC_016786.1); Spiroplasma syrphidicola (NCBI Ref: NC_021284.1); Prevotella intermedia (NCBI Ref: NC_017861.1); Spiroplasma taiwanense (NCBI Ref: NC_021846.1); Streptococcus iniae (NCBI Ref: NC_021314.1); Belliella baltica (NCBI Ref: NC_018010.1); Psychroflexus torquis (NCBI Ref: NC_018721.1); Streptococcus thermophilus (NCBI Ref: YP_820832.1); Listeria innocua (NCBI Ref: NP 472073.1); Campylobacter jejuni (NCBI Ref: YP_002344900.1); Neisseria meningitidis (NCBI Ref: YP_002342100.1), Streptococcus pyogenes, or Staphylococcus aureus.

Cas9 domains of Nucleobase Editors

[0155] Cas9 nuclease sequences and structures are well known to those of skill in the art (See, e.g., “Complete genome sequence of an M1 strain of Streptococcus pyogenes.” Ferretti et al., J. J., McShan W. M., Ajdic D. J., Savic D. J., Savic G., Lyon K., Primeaux C, Sezate S., Suvorov A. N., Kenton S., Lai H. S., Lin S. P., Qian Y., Jia H. G., Najar F. Z., Ren Q., Zhu H., Song L., White J., Yuan X., Clifton S. W., Roe B. A., McLaughlin R. E., Proc. Natl. Acad. Sci. U.S.A. 98:4658-4663(2001); “CRISPR RNA maturation by trans-encoded small RNA and host factor RNase III.” Deltcheva E., Chylinski K., Sharma C. M., Gonzales K., Chao Y., Pirzada Z. A., Eckert M. R., Vogel J Charpentier E., Nature 471:602-607(2011); and “A programmable dual-RNA-guided DNA endonuclease in adaptive bacterial immunity.” Jinek M., Chylinski K., Fonfara I., Hauer M., Doudna J. A., Charpentier E. Science 337:816-821(2012), the entire contents of each of which are incorporated herein by reference). Cas9 orthologs have been described in various species, including, but not limited to, S. pyogenes and S. thermophilus. Additional suitable Cas9 nucleases and sequences will be apparent to those of skill in the art based on this disclosure, and such Cas9 nucleases and sequences include Cas9 sequences from the organisms and loci disclosed in Chylinski, Rhun, and Charpentier, “The tracrRNA and Cas9 families of type II CRISPR-Cas immunity systems” (2013) RNA Biology 10:5, 726-737; the entire contents of which are incorporated herein by reference.

[0156] In some aspects, a nucleic acid programmable DNA binding protein (napDNAbp) is a Cas9 domain. Non-limiting, exemplary Cas9 domains are provided herein. The Cas9 domain may be a nuclease active Cas9 domain, a nuclease inactive Cas9 domain, or a Cas9 nickase. In some embodiments, the Cas9 domain is a nuclease active domain. For example, the Cas9 domain may be a Cas9 domain that cuts both strands of a duplexed nucleic acid (e.g., both strands of a duplexed DNA molecule). In some embodiments, the Cas9 domain comprises any one of the amino acid sequences as set forth herein. In some embodiments the Cas9 domain comprises an amino acid sequence that is at least 60%, at least 65%, at least 70%, at least 75%, at least 80%, at least 85%, at least 90%, at least 95%, at least 96%, at least 97%, at least 98%, at least 99%, or at least 99.5% identical to any one of the amino acid sequences set forth herein. In some embodiments, the Cas9 domain comprises an amino acid sequence that has 1, 2, 3, 4, 5, 6, 7, 8, 9, 10, 11, 12, 13, 14, 15, 16, 17, 18, 19, 20, 21, 22, 21, 24, 25, 26, 27, 28, 29, 30, 31, 32, 33, 34, 35, 36, 37, 38, 39, 40, 41, 42, 43, 44, 45, 46, 47, 48, 49, 50 or more mutations compared to any one of the amino acid sequences set forth herein. In some embodiments, the Cas9 domain comprises an amino acid sequence that has at least 10, at least 15, at least 20, at least 30, at least 40, at least 50, at least 60, at least 70, at least 80, at least 90, at least 100, at least 150, at least 200, at least 250, at least 300, at least 350, at least 400, at least 500, at least 600, at least 700, at least 800, at least 900, at least 1000, at least 1100, or at least 1200 identical contiguous amino acid residues as compared to any one of the amino acid sequences set forth herein.

[0157] In some embodiments, proteins comprising fragments of Cas9 are provided. For example, in some embodiments, a protein comprises one of two Cas9 domains: (1) the gRNA binding domain of Cas9; or (2) the DNA cleavage domain of Cas9. In some embodiments, proteins comprising Cas9 or fragments thereof are referred to as “Cas9 variants.” A Cas9 variant shares homology to Cas9, or a fragment thereof. For example, a Cas9 variant is at least about 70% identical, at least about 80% identical, at least about 90% identical, at least about 95% identical, at least about 96% identical, at least about 97% identical, at least about 98% identical, at least about 99% identical, at least about 99.5% identical, or at least about 99.9% identical to wild type Cas9. In some embodiments, the Cas9 variant may have 1, 2, 3, 4, 5, 6, 7, 8, 9, 10, 11, 12, 13, 14, 15, 16, 17, 18, 19, 20, 21, 22, 21, 24, 25, 26, 27, 28, 29, 30, 31, 32, 33, 34, 35, 36, 37, 38, 39, 40, 41, 42, 43, 44, 45, 46, 47, 48, 49, 50 or more amino acid changes compared to wild type Cas9. In some embodiments, the Cas9 variant comprises a fragment of Cas9 (e.g., a gRNA binding domain or a DNA-cleavage domain), such that the fragment is at least about 70% identical, at least about 80% identical, at least about 90% identical, at least about 95% identical, at least about 96% identical, at least about 97% identical, at least about 98% identical, at least about 99% identical, at least about 99.5% identical, or at least about 99.9% identical to the corresponding fragment of wild type Cas9. In some embodiments, the fragment is at least 30%, at least 35%, at least 40%, at least 45%, at least 50%, at least 55%, at least 60%, at least 65%, at least 70%, at least 75%, at least 80%, at least 85%, at least 90%, at least 95% identical, at least 96%, at least 97%, at least 98%, at least 99%, or at least 99.5% of the amino acid length of a corresponding wild type Cas9. In some embodiments, the fragment is at least 100 amino acids in length. In some embodiments, the fragment is at least 100, 150, 200, 250, 300, 350, 400, 450, 500, 550, 600, 650, 700, 750, 800, 850, 900, 950, 1000, 1050, 1100, 1150, 1200, 1250, or at least 1300 amino acids in length.

[0158] In some embodiments, Cas9 fusion proteins as provided herein comprise the full-length amino acid sequence of a Cas9 protein, e.g., one of the Cas9 sequences provided herein. In other embodiments, however, fusion proteins as provided herein do not comprise a full-length Cas9 sequence, but only one or more fragments thereof. Exemplary amino acid sequences of suitable Cas9 domains and Cas9 fragments are provided herein, and additional suitable sequences of Cas9 domains and fragments will be apparent to those of skill in the art.

[0159] A Cas9 protein can associate with a guide RNA that guides the Cas9 protein to a specific DNA sequence that has complementary to the guide RNA. In some embodiments, the polynucleotide programmable nucleotide binding domain is a Cas9 domain, for example a nuclease active Cas9, a Cas9 nickase (nCas9), or a nuclease inactive Cas9 (dCas9). Examples of nucleic acid programmable DNA binding proteins include, without limitation, Cas9 (e.g., dCas9 and nCas9), Cas12a/Cpf1, Cas12b/C2c1, Cas12c/C2c3, Cas12d/CasY, Cas12e/CasX, Cas12g, Cas12h, and Cas12i.

[0160] In some embodiments, wild type Cas9 corresponds to Cas9 from Streptococcus pyogenes (NCBI Reference Sequence: NC_017053.1, nucleotide and amino acid sequences as follows).

ATGGATAAGAAATACTCAATAGGCTTAGATATCGGCACAAATAGCGTCGGATGGGCGGTGAT
CACTGATGATTATAAGGTTCCGTCTAAAAAGTTCAAGGTTCTGGGAAATACAGACCGCCACA
GTATCAAAAAAAATCTTATAGGGGCTCTTTTATTTGGCAGTGGAGAGACAGCGGAAGCGACT
CGTCTCAAACGGACAGCTCGTAGAAGGTATACACGTCGGAAGAATCGTATTTGTTATCTACA
GGAGATTTTTTCAAATGAGATGGCGAAAGTAGATGATAGTTTCTTTCATCGACTTGAAGAGT
CTTTTTTGGTGGAAGAAGACAAGAAGCATGAACGTCATCCTATTTTTGGAAATATAGTAGAT
GAAGTTGCTTATCATGAGAAATATCCAACTATCTATCATCTGCGAAAAAAATIGGCAGATIC
TACTGATAAAGCGGATTTGCGCTTAATCTATTTGGCCTTAGCGCATATGATTAAGTTTCGTG
GTCATTTTTTGATTGAGGGAGATTTAAATCCTGATAATAGTGATGTGGACAAACTATTTATC
CAGTIGGTACAAATCTACAATCAATTATITGAAGAAAACCCTATTAACGCAAGTAGAGTAGA
TGCTAAAGCGATTCTITCTGCACGATTGAGTAAATCAAGACGATTAGAAAATCTCATTGCTC
AGCTCCCCGGTGAGAAGAGAAATGGCTTGTTTGGGAATCTCATTGCTTTGTCATTGGGATTG
ACCCCTAATTTTAAATCAAATTTTGATTTGGCAGAAGATGCTAAATTACAGCTTTCAAAAGA
TACTTACGATGATGATTTAGATAATTTATTGGCGCAAATTGGAGATCAATATGCTGATTTGT
TTTTGGCAGCTAAGAATTTATCAGATGCTATTTTACTTTCAGATATCCTAAGAGTAAATAGT
GAAATAACTAAGGCTCCCCTATCAGCTTCAATGATTAAGCGCTACGATGAACATCATCAAGA
CTIGACTCTITTAAAAGCTITAGTICGACAACAACTICCAGAAAAGTATAAAGAAATCTITT
TTGATCAATCAAAAAACGGATATGCAGGTTATATTGATGGGGGAGCTAGCCAAGAAGAATTT
TATAAATTTATCAAACCAATTTTAGAAAAAATGGATGGTACTGAGGAATTATTGGTGAAACT
AAATCGTGAAGATTIGCTGCGCAAGCAACGGACCITTGACAACGGCTCTATICCCCATCAAA
TTCACTTGGGTGAGCTGCATGCTATTTTGAGAAGACAAGAAGACTTTTATCCATTTTTAAAA
GACAATCGTGAGAAGATTGAAAAAATCTTGACTTTTCGAATTCCTTATTATGTTGGTCCATT
GGCGCGTGGCAATAGTCGTTTTGCATGGATGACTCGGAAGTCTGAAGAAACAATTACCCCAT
GGAATTTTGAAGAAGTTGTCGATAAAGGTGCTTCAGCTCAATCATTTATTGAACGCATGACA
AACTTTGATAAAAATCTTCCAAATGAAAAAGTACTACCAAAACATAGTTTGCTTTATGAGTA
TTTTACGGTTTATAACGAATTGACAAAGGTCAAATATGTTACTGAGGGAATGCGAAAACCAG
CATTTCTTTCAGGTGAACAGAAGAAAGCCATTGTTGATTTACTCTTCAAAACAAATCGAAAA
GTAACCGTTAAGCAATTAAAAGAAGATTATTICAAAAAAATAGAATGITTIGATAGTGITGA
AATTTCAGGAGTTGAAGATAGATTTAATGCTTCATTAGGCGCCTACCATGATTTGCTAAAAA
TTATTAAAGATAAAGATTTTTTGGATAATGAAGAAAATGAAGATATCTTAGAGGATATTGTT
TTAACATTGACCTTATTTGAAGATAGGGGGATGATTGAGGAAAGACTTAAAACATATGCTCA
CCTCTTTGATGATAAGGTGATGAAACAGCTTAAACGTCGCCGTTATACTGGTTGGGGACGTT
IGTCTCGAAAATTGATTAATGGTATTAGGGATAAGCAATCTGGCAAAACAATATTAGATTTT
TTGAAATCAGATGGTTTTGCCAATCGCAATTTTATGCAGCTGATCCATGATGATAGTTTGAC
ATITAAAGAAGATATICAAAAAGCACAGGIGICTGGACAAGGCCATAGITTACATGAACAGA
TTGCTAACTTAGCTGGCAGTCCTGCTATTAAAAAAGGTATITTACAGACTGTAAAAATTGIT
GATGAACTGGTCAAAGTAATGGGGCATAAGCCAGAAAATATCGTTATTGAAATGGCACGTGA
AAATCAGACAACTCAAAAGGGCCAGAAAAATTCGCGAGAGCGTATGAAACGAATCGAAGAAG
GTATCAAAGAATTAGGAAGTCAGATTCTTAAAGAGCATCCTGTTGAAAATACTCAATTGCAA
AATGAAAAGCTCTATCTCTATTATCTACAAAATGGAAGAGACATGTATGTGGACCAAGAATT
AGATATTAATCGTTTAAGTGATTATGATGTCGATCACATTGTTCCACAAAGTTTCATTAAAG
ACGATTCAATAGACAATAAGGTACTAACGCGTTCTGATAAAAATCGTGGTAAATCGGATAAC
GTTCCAAGTGAAGAAGTAGTCAAAAAGATGAAAAACTATTGGAGACAACTTCTAAACGCCAA
GTTAATCACTCAACGTAAGTTTGATAATTTAACGAAAGCTGAACGTGGAGGTTTGAGTGAAC
TTGATAAAGCTGGTTTTATCAAACGCCAATTGGTTGAAACTCGCCAAATCACTAAGCATGTG
GCACAAATITTGGATAGTCGCATGAATACTAAATACGATGAAAATGATAAACTTATTCGAGA
GGTTAAAGTGATTACCTTAAAATCTAAATTAGTTTCTGACTTCCGAAAAGATTTCCAATTCT
ATAAAGTACGTGAGATTAACAATTACCATCATGCCCATGATGCGTATCTAAATGCCGTCGTT
GGAACTGCTTTGATTAAGAAATATCCAAAACTTGAATCGGAGTTTGTCTATGGTGATTATAA
AGTTTATGATGTTCGTAAAATGATTGCTAAGTCTGAGCAAGAAATAGGCAAAGCAACCGCAA
AATATTTCTTTTACTCTAATATCATGAACTTCTTCAAAACAGAAATTACACTTGCAAATGGA
GAGATTCGCAAACGCCCTCTAATCGAAACTAATGGGGAAACTGGAGAAATTGTCTGGGATAA
AGGGCGAGATTTTGCCACAGTGCGCAAAGTATTGTCCATGCCCCAAGTCAATATTGTCAAGA
AAACAGAAGTACAGACAGGCGGATTCTCCAAGGAGTCAATTTTACCAAAAAGAAATTCGGAC
AAGCTTATTGCTCGTAAAAAAGACTGGGATCCAAAAAAATATGGTGGTTTTGATAGTCCAAC
GGTAGCTTATTCAGTCCTAGTGGTTGCTAAGGTGGAAAAAGGGAAATCGAAGAAGTTAAAAT
CCGTTAAAGAGTTACTAGGGATCACAATTATGGAAAGAAGTTCCTTTGAAAAAAATCCGATT
GACTTTTTAGAAGCTAAAGGATATAAGGAAGTTAAAAAAGACTTAATCATTAAACTACCTAA
ATATAGTCTTTTTGAGTTAGAAAACGGTCGTAAACGGATGCTGGCTAGTGCCGGAGAATTAC
AAAAAGGAAATGAGCTGGCTCTGCCAAGCAAATATGTGAATTTTTTATATTTAGCTAGTCAT
TATGAAAAGTTGAAGGGTAGTCCAGAAGATAACGAACAAAAACAATTGTTTGTGGAGCAGCA
TAAGCATTATTTAGATGAGATTATTGAGCAAATCAGTGAATTTTCTAAGCGTGTTATTTTAG
CAGATGCCAATTTAGATAAAGTTCTTAGTGCATATAACAAACATAGAGACAAACCAATACGT
GAACAAGCAGAAAATATTATTCATTTATTTACGTTGACGAATCTTGGAGCTCCCGCTGCTTT
TAAATATTTTGATACAACAATTGATCGTAAACGATATACGTCTACAAAAGAAGTTTTAGATG
CCACTCTTATCCATCAATCCATCACTGGTCTTTATGAAACACGCATTGATTTGAGTCAGCTA
GGAGGTGACTGA
MDKKYSIGLDIGTNSVGWAVITDDYKVPSKKFKVLGNTDRHSIKKNLIGALLFGSGETAEAT
RLKRTARRRYTRRKNRICYLQEIFSNEMAKVDDSFFHRLEESFLVEEDKKHERHPIFGNIVD
EVAYHEKYPTIYHLRKKLADSTDKADLRLIYLALAHMIKFRGHFLIEGDLNPDNSDVDKLFI
QLVQIYNQLFEENPINASRVDAKAILSARLSKSRRLENLIAQLPGEKRNGLFGNLIALSLGL
TPNFKSNFDLAEDAKLQLSKDTYDDDLDNLLAQIGDQYADLFLAAKNLSDAILLSDILRVNS
EITKAPLSASMIKRYDEHHQDLTLLKALVRQQLPEKYKEIFFDQSKNGYAGYIDGGASQEEF
YKFIKPILEKMDGTEELLVKLNREDLLRKQRTFDNGSIPHQIHLGELHAILRRQEDFYPFLK
DNREKIEKILTFRIPYYVGPLARGNSRFAWMTRKSEETITPWNFEEVVDKGASAQSFIERMT
NFDKNLPNEKVLPKHSLLYEYFTVYNELTKVKYVTEGMRKPAFLSGEQKKAIVDLLFKTNRK
VTVKQLKEDYFKKIECFDSVEISGVEDRFNASLGAYHDLLKIIKDKDFLDNEENEDILEDIV
LTLTLFEDRGMIEERLKTYAHLFDDKVMKQLKRRRYTGWGRLSRKLINGIRDKQSGKTILDF
LKSDGFANRNFMQLIHDDSLTFKEDIQKAQVSGQGHSLHEQIANLAGSPAIKKGILQTVKIV
DELVKVMGHKPENIVIEMARENQTTQKGQKNSRERMKRIEEGIKELGSQILKEHPVENTQLQ
NEKLYLYYLQNGRDMYVDQELDINRLSDYDVDHIVPQSFIKDDSIDNKVLTRSDKNRGKSDN
VPSEEVVKKMKNYWRQLLNAKLITQRKFDNLTKAERGGLSELDKAGFIKRQLVETRQITKHV
AQILDSRMNTKYDENDKLIREVKVITLKSKLVSDFRKDFQFYKVREINNYHHAHDAYLNAVV
GTALIKKYPKLESEFVYGDYKVYDVRKMIAKSEQEIGKATAKYFFYSNIMNFFKTEITLANG
EIRKRPLIETNGETGEIVWDKGRDFATVRKVLSMPQVNIVKKTEVQTGGFSKESILPKRNSD
KLIARKKDWDPKKYGGFDSPTVAYSVLVVAKVEKGKSKKLKSVKELLGITIMERSSFEKNPI
DFLEAKGYKEVKKDLIIKLPKYSLFELENGRKRMLASAGELQKGNELALPSKYVNFLYLASH
YEKLKGSPEDNEQKQLFVEQHKHYLDEIIEQISEFSKRVILADANLDKVLSAYNKHRDKPIR
EQAENIIHLFTLTNLGAPAAFKYFDTTIDRKRYTSTKEVLDATLIHQSITGLYETRIDLSQL
GGD

(single underline: HNH domain; double underline: RuvC domain)

[0161] In some embodiments, wild type Cas9 corresponds to, or comprises the following nucleotide and/or amino acid sequences:

ATGGATAAAAAGTATTCTATTGGTTTAGACATCGGCACTAATTCCGTTGGATGGGCTGTCAT
AACCGATGAATACAAAGTACCTTCAAAGAAATTTAAGGTGTTGGGGAACACAGACCGTCATT
CGATTAAAAAGAATCTTATCGGTGCCCTCCTATTCGATAGTGGCGAAACGGCAGAGGCGACT
CGCCTGAAACGAACCGCTCGGAGAAGGTATACACGTCGCAAGAACCGAATATGTTACTTACA
AGAAATTTTTAGCAATGAGATGGCCAAAGTTGACGATTCTTTCTTTCACCGTTTGGAAGAGT
CCTTCCTTGTCGAAGAGGACAAGAAACATGAACGGCACCCCATCTTTGGAAACATAGTAGAT
GAGGTGGCATATCATGAAAAGTACCCAACGATTTATCACCTCAGAAAAAAGCTAGTTGACTC
AACTGATAAAGCGGACCTGAGGTTAATCTACTTGGCTCTTGCCCATATGATAAAGTTCCGTG
GGCACTTTCTCATTGAGGGTGATCTAAATCCGGACAACTCGGATGTCGACAAACTGTTCATC
CAGTTAGTACAAACCTATAATCAGTTGTTTGAAGAGAACCCTATAAATGCAAGTGGCGTGGA
TGCGAAGGCTATTCTTAGCGCCCGCCTCTCTAAATCCCGACGGCTAGAAAACCTGATCGCAC
AATTACCCGGAGAGAAGAAAAATGGGTTGTTCGGTAACCTTATAGCGCTCTCACTAGGCCTG
ACACCAAATTTTAAGTCGAACTTCGACTTAGCTGAAGATGCCAAATTGCAGCTTAGTAAGGA
CACGTACGATGACGATCTCGACAATCTACTGGCACAAATTGGAGATCAGTATGCGGACTTAT
ITTIGGCTGCCAAAAACCTTAGCGATGCAATCCICCTATCTGACATACTGAGAGTTAATACT
GAGATTACCAAGGCGCCGTTATCCGCTTCAATGATCAAAAGGTACGATGAACATCACCAAGA
CTTGACACTTCTCAAGGCCCTAGTCCGTCAGCAACTGCCTGAGAAATATAAGGAAATATTCT
TTGATCAGTCGAAAAACGGGTACGCAGGTTATATTGACGGCGGAGCGAGTCAAGAGGAATTC
TACAAGTTTATCAAACCCATATTAGAGAAGATGGATGGGACGGAAGAGTTGCTTGTAAAACT
CAATCGCGAAGATCTACTGCGAAAGCAGCGGACTITCGACAACGGTAGCATICCACATCAAA
TCCACTTAGGCGAATTGCATGCTATACTTAGAAGGCAGGAGGATTTTTATCCGTTCCTCAAA
GACAATCGTGAAAAGATTGAGAAAATCCTAACCITICGCATACCITACTATGTGGGACCCCT
GGCCCGAGGGAACTCTCGGTTCGCATGGATGACAAGAAAGTCCGAAGAAACGATTACTCCAT
GGAATITTGAGGAAGTIGTCGATAAAGGIGCGTCAGCTCAATCGTICATCGAGAGGATGACC
AACTTTGACAAGAATTTACCGAACGAAAAAGTATTGCCTAAGCACAGTTTACTTTACGAGTA
TTTCACAGTGTACAATGAACTCACGAAAGTTAAGTATGTCACTGAGGGCATGCGTAAACCCG
CCTTTCTAAGCGGAGAACAGAAGAAAGCAATAGTAGATCTGTTATTCAAGACCAACCGCAAA
GTGACAGTTAAGCAATTGAAAGAGGACTACTTTAAGAAAATTGAATGCTTCGATTCTGTCGA
GATCTCCGGGGTAGAAGATCGATTTAATGCGTCACTTGGTACGTATCATGACCTCCTAAAGA
TAATTAAAGATAAGGACTTCCTGGATAACGAAGAGAATGAAGATATCTTAGAAGATATAGTG
TTGACTCTTACCCTCTTTGAAGATCGGGAAATGATTGAGGAAAGACTAAAAACATACGCTCA
CCTGTTCGACGATAAGGTTATGAAACAGTTAAAGAGGCGTCGCTATACGGGCTGGGGACGAT
TGICGCGGAAACITATCAACGGGATAAGAGACAAGCAAAGTGGTAAAACTATTCTCGATTTT
CTAAAGAGCGACGGCTTCGCCAATAGGAACTTTATGCAGCTGATCCATGATGACICTITAAC
CTTCAAAGAGGATATACAAAAGGCACAGGTTTCCGGACAAGGGGACTCATTGCACGAACATA
TIGCGAATCTIGCTGGTICGCCAGCCATCAAAAAGGGCATACTCCAGACAGICAAAGTAGTG
GATGAGCTAGTTAAGGTCATGGGACGTCACAAACCGGAAAACATTGTAATCGAGATGGCACG
CGAAAATCAAACGACTCAGAAGGGGCAAAAAAACAGTCGAGAGCGGATGAAGAGAATAGAAG
AGGGTATTAAAGAACTGGGCAGCCAGATCTTAAAGGAGCATCCTGTGGAAAATACCCAATTG
CAGAACGAGAAACTITACCTCTATTACCTACAAAATGGAAGGGACATGTATGTTGATCAGGA
ACTGGACATAAACCGTTTATCTGATTACGACGTCGATCACATTGTACCCCAATCCTTTTTGA
AGGACGATTCAATCGACAATAAAGTGCTTACACGCTCGGATAAGAACCGAGGGAAAAGTGAC
AATGTTCCAAGCGAGGAAGTCGTAAAGAAAATGAAGAACTATTGGCGGCAGCTCCTAAATGC
GACTGATAACGCAAAGAAAGTTCGATAACTTACTAAAGCTGAGAGGGGTGGCTTGTCTG
ACTTGACAAGGCCGGATTTATTAAACGTCAGCTCGTGGAAACCCGCCAAATCACAAAGCAT
GTTGCACAGATACTAGATTCCCGAATGAATACGAAATACGACGAGAACGATAAGCTGATTCG
GGAAGTCAAAGTAATCACTTTAAAGTCAAAATTGGTGTCGGACTTCAGAAAGGATTTTCAAT
TCTATAAAGTTAGGGAGATAAATAACTACCACCATGCGCACGACGCTTATCTTAATGCCGTC
GTAGGGACCGCACTCATTAAGAAATACCCGAAGCTAGAAAGTGAGTTTGTGTATGGTGATTA
CAAAGTTTATGACGTCCGTAAGATGATCGCGAAAAGCGAACAGGAGATAGGCAAGGCTACAG
CCAAATACTTCTTTTATTCTAACATTATGAATTTCTTTAAGACGGAAATCACTCTGGCAAAC
GGAGAGATACGCAAACGACCTTTATTGAAACCAATGGGGAGACAGGTGAAATCGTATGGGA
TAAGGGCCGGGACTTCGCGACGGTGAGAAAAGTTTTGTCCATGCCCCAAGTCAACATAGTAA
AGAAAACTGAGGIGCAGACCGGAGGGITTTCAAAGGAATCGATICTTCCAAAAAGGAATAGT
GATAAGCTCATCGCTCGTAAAAAGGACTGGGACCCGAAAAAGTACGGTGGCTTCGATAGCCC
TACAGTTGCCTATTCTGTCCTAGTAGTGGCAAAAGTTGAGAAGGGAAAATCCAAGAAACTGA
AGTCAGTCAAAGAATTATTGGGGATAACGATTATGGAGCGCTCGTCTTTTGAAAAGAACCCC
ATCGACTTCCTTGAGGCGAAAGGTTACAAGGAAGTAAAAAAGGATCTCATAATTAAACTACC
AAAGTATAGTCTGTTTGAGTTAGAAAATGGCCGAAAACGGATGTTGGCTAGCGCCGGAGAGC
TTCAAAAGGGGAACGAACTCGCACTACCGTCTAAATACGTGATTTCCIGTATTTAGCGTCC
CATTACGAGAAGTTGAAAGGTTCACCTGAAGATAACGAACAGAAGCAACTTTTTGTTGAGCA
GCACAAACATTATCTCGACGAAATCATAGAGCAAATTTCGGAATTCAGTAAGAGAGTCATCC
TAGCTGATGCCAICTGGACAAAGTATTAAGCGCATACAACAAGCACAGGGATAAACCCATA
CGTGAGCAGGCGGAAAATATTATCCATTTGTTTACTCTTACCAACCTCGGCGCTCCAGCCGC
ATTCAAGTATTTTGACACAACGATAGATCGCAAACGATACACTTCTACCAAGGAGGTGCTAG
ACGCGACACTGATTCACCAATCCATCACGGGATTATATGAAACTCGGATAGATTTGTCACAG
CTTGGGGGTGACGGATCCCCCAAGAAGAAGAGGAAAGTCTCGAGCGACTACAAAGACCATGA
CGGTGATTATAAAGATCATGACATCGATTACAAGGATGACGATGACAAGGCTGCAGGA
MDKKYSIGLAIGTNSVGWAVITDEYKVPSKKFKVLGNTDRHSIKKNLIGALLFDSGETAEAT
RLKRTARRRYTRRKNRICYLQEIFSNEMAKVDDSFFHRLEESFLVEEDKKHERHPIFGNIVD
EVAYHEKYPTIYHLRKKLVDSTDKADLRLIYLALAHMIKFRGHFLIEGDLNPDNSDVDKLFI
QLVQTYNQLFEENPINASGVDAKAILSARLSKSRRLENLIAQLPGEKKNGLFGNLIALSLGL
TPNFKSNFDLAEDAKLQLSKDTYDDDLDNLLAQIGDQYADLFLAAKNLSDAILLSDILRVNT
EITKAPLSASMIKRYDEHHQDLTLLKALVRQQLPEKYKEIFFDQSKNGYAGYIDGGASQEEF
YKFIKPILEKMDGTEELLVKLNREDLLRKQRTFDNGSIPHQIHLGELHAILRRQEDFYPFLK
DNREKIEKILTFRIPYYVGPLARGNSRFAWMTRKSEETITPWNFEEVVDKGASAQSFIERMT
NFDKNLPNEKVLPKHSLLYEYFTVYNELTKVKYVTEGMRKPAFLSGEQKKAIVDLLFKTNRK
VTVKQLKEDYFKKIECFDSVEISGVEDRFNASLGTYHDLLKIIKDKDFLDNEENEDILEDIV
LTLTLFEDREMIEERLKTYAHLFDDKVMKQLKRRRYTGWGRLSRKLINGIRDKQSGKTILDF
LKSDGFANRNFMQLIHDDSLTFKEDIQKAQVSGQGDSLHEHIANLAGSPAIKKGILQTVKVV
DELVKVMGRHKPENIVIEMARENQTTQKGQKNSRERMKRIEEGIKELGSQILKEHPVENTQL
QNEKLYLYYLQNGRDMYVDQELDINRLSDYDVDHIVPQSFLKDDSIDNKVLTRSDKNRGKSD
NVPSEEVVKKMKNYWRQLLNAKLITQRKFDNLTKAERGGLSELDKAGFIKRQLVETRQITKH
VAQILDSRMNTKYDENDKLIREVKVITLKSKLVSDFRKDFQFYKVREINNYHHAHDAYLNAV
VGTALIKKYPKLESEFVYGDYKVYDVRKMIAKSEQEIGKATAKYFFYSNIMNFFKTEITLAN
GEIRKRPLIETNGETGEIVWDKGRDFATVRKVLSMPQVNIVKKTEVQTGGFSKESILPKRNS
DKLIARKKDWDPKKYGGFDSPTVAYSVLVVAKVEKGKSKKLKSVKELLGITIMERSSFEKNP
IDFLEAKGYKEVKKDLIIKLPKYSLFELENGRKRMLASAGELQKGNELALPSKYVNFLYLAS
HYEKLKGSPEDNEQKQLFVEQHKHYLDEIIEQISEFSKRVILADANLDKVLSAYNKHRDKPI
REQAENIIHLFTLTNLGAPAAFKYFDTTIDRKRYTSTKEVLDATLIHQSITGLYETRIDLSQ
LGGD.

(single underline: HNH domain; double underline: RuvC domain)

[0162] In some embodiments, wild type Cas9 corresponds to Cas9 from Streptococcus pyogenes (NCBI Reference Sequence: NC_002737.2 (nucleotide sequence as follows); and Uniprot Reference Sequence: Q99ZW2 (amino acid sequence as follows):

ATGGATAAGAAATACTCAATAGGCTTAGATATCGGCACAAATAGCGTCGGATGGGCGGTGAT
CACTGATGAATATAAGGTTCCGTCTAAAAAGTTCAAGGTTCTGGGAAATACAGACCGCCACA
GTATCAAAAAAAATCTTATAGGGGCTCTTTTATTTGACAGTGGAGAGACAGCGGAAGCGACT
CGTCTCAAACGGACAGCTCGTAGAAGGTATACACGTCGGAAGAATCGTATTTGTTATCTACA
GGAGATTTTTTCAAATGAGATGGCGAAAGTAGATGATAGTTTCTTTCATCGACTTGAAGAGT
CTTTTTTGGTGGAAGAAGACAAGAAGCATGAACGTCATCCTATTTTTGGAAATATAGTAGAT
GAAGTTGCTTATCATGAGAAATATCCAACTATCTATCATCTGCGAAAAAAATTGGTAGATTC
TACTGATAAAGCGGATTTGCGCTTAATCTATTTGGCCTTAGCGCATATGATTAAGTTTCGTG
GTCATTTTTTGATTGAGGGAGATTTAAATCCTGATAATAGTGATGTGGACAAACTATTTATC
CAGTTGGTACAAACCTACAATCAATTATTTGAAGAAAACCCTATTAACGCAAGTGGAGTAGA
TGCTAAAGCGATTCTTTCTGCACGATTGAGTAAATCAAGACGATTAGAAAATCTCATTGCTC
AGCTCCCCGGTGAGAAGAAAAATGGCTTATTTGGGAATCTCATTGCTTTGTCATTGGGTTTG
ACCCCTAATTTTAAATCAAATTTTGATTTGGCAGAAGATGCTAAATTACAGCTTTCAAAAGA
TACTTACGATGATGATTTAGATAATTTATTGGCGCAAATTGGAGATCAATATGCTGATTTGT
TTTTGGCAGCTAAGAATTTATCAGATGCTATTTTACTTTCAGATATCCTAAGAGTAAATACT
GAAATAACTAAGGCTCCCCTATCAGCTTCAATGATTAAACGCTACGATGAACATCATCAAGA
CTTGACTCTTTTAAAAGCTTTAGTTCGACAACAACTTCCAGAAAAGTATAAAGAAATCTTTT
TTGATCAATCAAAAAACGGATATGCAGGTTATATTGATGGGGGAGCTAGCCAAGAAGAATTT
TATAAATTTATCAAACCAATTTTAGAAAAAATGGATGGTACTGAGGAATTATTGGTGAAACT
AAATCGTGAAGATTTGCTGCGCAAGCAACGGACCTTTGACAACGGCTCTATTCCCCATCAAA
TTCACTTGGGTGAGCTGCATGCTATTTTGAGAAGACAAGAAGACTTTTATCCATTTTTAAAA
GACAATCGTGAGAAGATTGAAAAAATCTTGACTTTTCGAATTCCTTATTATGTTGGTCCATT
GGCGCGTGGCAATAGTCGTTTTGCATGGATGACTCGGAAGTCTGAAGAAACAATTACCCCAT
GGAATTTTGAAGAAGTTGTCGATAAAGGTGCTTCAGCTCAATCATTTATTGAACGCATGACA
AACTTTGATAAAAATCTTCCAAATGAAAAAGTACTACCAAAACATAGTTTGCTTTATGAGTA
TTTTACGGTTTATAACGAATTGACAAAGGTCAAATATGTTACTGAAGGAATGCGAAAACCAG
CATTTCTTTCAGGTGAACAGAAGAAAGCCATTGTTGATTTACTCTTCAAAACAAATCGAAAA
GTAACCGTTAAGCAATTAAAAGAAGATTATTTCAAAAAAATAGAATGTTTTGATAGTGTTGA
AATTTCAGGAGTTGAAGATAGATTTAATGCTTCATTAGGTACCTACCATGATTTGCTAAAAA
TTATTAAAGATAAAGATTTTTTGGATAATGAAGAAAATGAAGATATCTTAGAGGATATTGTT
TTAACATTGACCTTATTTGAAGATAGGGAGATGATTGAGGAAAGACTTAAAACATATGCTCA
CCTCTTTGATGATAAGGTGATGAAACAGCTTAAACGTCGCCGTTATACTGGTTGGGGACGTT
TGTCTCGAAAATTGATTAATGGTATTAGGGATAAGCAATCTGGCAAAACAATATTAGATTTT
TTGAAATCAGATGGTTTTGCCAATCGCAATTTTATGCAGCTGATCCATGATGATAGTTTGAC
ATTTAAAGAAGACATTCAAAAAGCACAAGTGTCTGGACAAGGCGATAGTTTACATGAACATA
TTGCAAATTTAGCTGGTAGCCCTGCTATTAAAAAAGGTATTTTACAGACTGTAAAAGTTGTT
GATGAATTGGTCAAAGTAATGGGGCGGCATAAGCCAGAAAATATCGTTATTGAAATGGCACG
TGAAAATCAGACAACTCAAAAGGGCCAGAAAAATTCGCGAGAGCGTATGAAACGAATCGAAG
AAGGTATCAAAGAATTAGGAAGTCAGATTCTTAAAGAGCATCCTGTTGAAAATACTCAATTG
CAAAATGAAAAGCTCTATCTCTATTATCTCCAAAATGGAAGAGACATGTATGTGGACCAAGA
ATTAGATATTAATCGTTTAAGTGATTATGATGTCGATCACATTGTTCCACAAAGTTTCCTTA
AAGACGATTCAATAGACAATAAGGTCTTAACGCGTTCTGATAAAAATCGTGGTAAATCGGAT
AACGTTCCAAGTGAAGAAGTAGTCAAAAAGATGAAAAACTATTGGAGACAACTTCTAAACGC
CAAGTTAATCACTCAACGTAAGTTTGATAATTTAACGAAAGCTGAACGTGGAGGTTTGAGTG
AACTTGATAAAGCTGGTTTTATCAAACGCCAATTGGTTGAAACTCGCCAAATCACTAAGCAT
GTGGCACAAATTTTGGATAGTCGCATGAATACTAAATACGATGAAAATGATAAACTTATTCG
AGAGGTTAAAGTGATTACCTTAAAATCTATTAGTTTCTGACTTCCGAAAAGATTTCCAAT
TCTATAAAGTACGTGAGATTAACAATTACCATCATGCCCATGATGCGTATCTAAATGCCGTC
GTTGGAACTGCTTTGATTAAGAAATATCCAAAACTTGAATCGGAGTTTGTCTATGGTGATTA
TAAAGTTTATGATGTTCGTAAAATGATTGCTAAGTCTGAGCAAGAAATAGGCAAAGCAACCG
CAAAATATTTCTTTTACTCTAATATCATGAACTTCTTCAAAACAGAAATTACACTTGCAAAT
GGAGAGATTCGCAAACGCCCTCTATCGAAACTAATGGGGAAACTGGAGAAATTGTCTGGGA
TAAAGGGCGAGATTTTGCCACAGTGCGCAAAGTATTGTCCATGCCCCAAGTCAATATTGTCA
AGAAAACAGAAGTACAGACAGGCGGATTCTCCAAGGAGTCAATTTTACCAAAAAGAAATTCG
GACAAGCTTATTGCTCGTAAAAAAGACTGGGATCCAAAAAAATATGGTGGTTTTGATAGTCC
AACGGTAGCTTATTCAGTCCTAGTGGTTGCTAAGGTGGAAAAAGGGAAATCGAAGAAGTTAA
ATCCGTTAAAAAAAAGAGTTACTAGGGATCACAATTATGGAAAGAAGTTCCTTTGAAATCCG
ATTGACTTTTTAGAAGCTAAAGGATATAAGGAAGTTAAAAAAGACTTATCATTAAACTACC
TAAATATAGTCTTTTTGAGTTAGAAAACGGTCGTAAACGGATGCTGGCTAGTGCCGGAGAAT
TACAAAAAGGAAATGAGCTGGCTCTGCCAAGCAAATATGTGAATTTTTTATATTTAGCTAGT
CATTATGAAAAGTTGAAGGGTAGTCCAGAAGATAACGAACAAAAACAATTGTTTGTGGAGCA
GCATAAGCATTATTTAGATGAGATTATTGAGCAAATCAGTGAATTTTCTAAGCGTGTTATTT
TAGCAGATGCCAATTTAGATAAAGTTCTTAGTGCATATAACAAACATAGAGACAAACCAATA
CGTGAACAAGCAGAAAATATTATTCATTTATTTACGTTGACGAATCTTGGAGCTCCCGCTGC
TTTTAAATATTTTGATACAACAATTGATCGTAAACGATATACGTCTACAAAAGAAGTTTTAG
ATGCCACTCTTATCCATCAATCCATCACTGGTCTTTATGAAACACGCATTGATTTGAGTCAG
CTAGGAGGTGACTGA
MDKKYSIGLDIGTNSVGWAVITDEYKVPSKKFKVLGNTDRHSIKKNLIGALLFDSGETAEAT
RLKRTARRRYTRRKNRICYLQEIFSNEMAKVDDSFFHRLEESFLVEEDKKHERHPIFGNIVD
EVAYHEKYPTIYHLRKKLVDSTDKADLRLIYLALAHMIKFRGHFLIEGDLNPDNSDVDKLFI
QLVQTYNQLFEENPINASGVDAKAILSARLSKSRRLENLIAQLPGEKKNGLFGNLIALSLGL
TPNFKSNFDLAEDAKLQLSKDTYDDDLDNLLAQIGDQYADLFLAAKNLSDAILLSDILRVNT
EITKAPLSASMIKRYDEHHQDLTLLKALVRQQLPEKYKEIFFDQSKNGYAGYIDGGASQEEF
YKFIKPILEKMDGTEELLVKLNREDLLRKQRTFDNGSIPHQIHLGELHAILRRQEDFYPFLK
DNREKIEKILTFRIPYYVGPLARGNSRFAWMTRKSEETITPWNFEEVVDKGASAQSFIERMT
NFDKNLPNEKVLPKHSLLYEYFTVYNELTKVKYVTEGMRKPAFLSGEQKKAIVDLLFKTNRK
VTVKQLKEDYFKKIECFDSVEISGVEDRFNASLGTYHDLLKIIKDKDFLDNEENEDILEDIV
LTLTLFEDREMIEERLKTYAHLFDDKVMKQLKRRRYTGWGRLSRKLINGIRDKQSGKTILDF
LKSDGFANRNFMQLIHDDSLTFKEDIQKAQVSGQGDSLHEHIANLAGSPAIKKGILQTVKVV
DELVKVMGRHKPENIVIEMARENQTTQKGQKNSRERMKRIEEGIKELGSQILKEHPVENTQL
QNEKLYLYYLQNGRDMYVDQELDINRLSDYDVDHIVPQSFLKDDSIDNKVLTRSDKNRGKSD
NVPSEEVVKKMKNYWRQLLNAKLITQRKFDNLTKAERGGLSELDKAGFIKRQLVETRQITKH
VAQILDSRMNTKYDENDKLIREVKVITLKSKLVSDFRKDFQFYKVREINNYHHAHDAYLNAV
VGTALIKKYPKLESEFVYGDYKVYDVRKMIAKSEQEIGKATAKYFFYSNIMNFFKTEITLAN
GEIRKRPLIETNGETGEIVWDKGRDFATVRKVLSMPQVNIVKKTEVQTGGFSKESILPKRNS
DKLIARKKDWDPKKYGGFDSPTVAYSVLVVAKVEKGKSKKLKSVKELLGITIMERSSFEKNP
IDFLEAKGYKEVKKDLIIKLPKYSLFELENGRKRMLASAGELQKGNELALPSKYVNFLYLAS
HYEKLKGSPEDNEQKQLFVEQHKHYLDEIIEQISEFSKRVILADANLDKVLSAYNKHRDKPI
REQAENIIHLFTLTNLGAPAAFKYFDTTIDRKRYTSTKEVLDATLIHQSITGLYETRIDLSQ
LGGD

(single underline: HNH domain; double underline: RuvC domain)

[0163] In some embodiments, Cas9 refers to Cas9 from: Corynebacterium ulcerans (NCBI Refs: NC_015683.1, NC_017317.1); Corynebacterium diphtheria (NCBI Refs: NC_016782.1, NC_016786.1); Spiroplasma syrphidicola (NCBI Ref: NC_021284.1); Prevotella intermedia (NCBI Ref: NC_017861.1); Spiroplasma taiwanense (NCBI Ref: NC_021846.1); Streptococcus iniae (NCBI Ref: NC_021314.1); Belliella baltica (NCBI Ref: NC_018010.1); Psychroflexus torquisI (NCBI Ref: NC_018721.1); Streptococcus thermophilus (NCBI Ref: YP_820832.1), Listeria innocua (NCBI Ref: NP 472073.1), Campylobacter jejuni (NCBI Ref: YP_002344900.1) or Neisseria meningitidis (NCBI Ref: YP_002342100.1) or to a Cas9 from any other organism.

[0164] It should be appreciated that additional Cas9 proteins (e.g., a nuclease dead Cas9 (dCas9), a Cas9 nickase (nCas9), or a nuclease active Cas9), including variants and homologs thereof, are within the scope of this disclosure. Exemplary Cas9 proteins include, without limitation, those provided below. In some embodiments, the Cas9 protein is a nuclease dead Cas9 (dCas9). In some embodiments, the Cas9 protein is a Cas9 nickase (nCas9). In some embodiments, the Cas9 protein is a nuclease active Cas9.

[0165] In some embodiments, the Cas9 domain is a nuclease-inactive Cas9 domain (dCas9). For example, the dCas9 domain may bind to a duplexed nucleic acid molecule (e.g., via a gRNA molecule) without cleaving either strand of the duplexed nucleic acid molecule. In some embodiments, the nuclease-inactive dCas9 domain comprises a D10X mutation and a H840X mutation of the amino acid sequence set forth herein, or a corresponding mutation in any of the amino acid sequences provided herein, wherein X is any amino acid change. In some embodiments, the nuclease-inactive dCas9 domain comprises a D10A mutation and a H840A mutation of the amino acid sequence set forth herein, or a corresponding mutation in any of the amino acid sequences provided herein. As one example, a nuclease-inactive Cas9 domain comprises the amino acid sequence set forth in Cloning vector pPlatTET-gRNA2 (Accession No. BAV54124).

[0166] The amino acid sequence of an exemplary catalytically inactive Cas9 (dCas9) is as follows:

MDKKYSIGLAIGTNSVGWAVITDEYKVPSKKFKVLGNTDRHSIKKNLIGALLFDSGETAEAT
RLKRTARRRYTRRKNRICYLQEIFSNEMAKVDDSFFHRLEESFLVEEDKKHERHPIFGNIVD
EVAYHEKYPTIYHLRKKLVDSTDKADLRLIYLALAHMIKFRGHFLIEGDLNPDNSDVDKLFI
QLVQTYNQLFEENPINASGVDAKAILSARLSKSRRLENLIAQLPGEKKNGLFGNLIALSLGL
TPNFKSNFDLAEDAKLQLSKDTYDDDLDNLLAQIGDQYADLFLAAKNLSDAILLSDILRVNT
EITKAPLSASMIKRYDEHHQDLTLLKALVRQQLPEKYKEIFFDQSKNGYAGYIDGGASQEEF
YKFIKPILEKMDGTEELLVKLNREDLLRKQRTFDNGSIPHQIHLGELHAILRRQEDFYPFLK
DNREKIEKILTFRIPYYVGPLARGNSRFAWMTRKSEETITPWNFEEVVDKGASAQSFIERMT
NFDKNLPNEKVLPKHSLLYEYFTVYNELTKVKYVTEGMRKPAFLSGEQKKAIVDLLFKTNRK
VTVKQLKEDYFKKIECFDSVEISGVEDRFNASLGTYHDLLKIIKDKDFLDNEENEDILEDIV
LTLTLFEDREMIEERLKTYAHLFDDKVMKQLKRRRYTGWGRLSRKLINGIRDKQSGKTILDF
LKSDGFANRNFMQLIHDDSLTFKEDIQKAQVSGQGDSLHEHIANLAGSPAIKKGILQTVKVV
DELVKVMGRHKPENIVIEMARENQTTQKGQKNSRERMKRIEEGIKELGSQILKEHPVENTQL
QNEKLYLYYLQNGRDMYVDQELDINRLSDYDVDAIVPQSFLKDDSIDNKVLTRSDKNRGKSD
NVPSEEVVKKMKNYWRQLLNAKLITQRKFDNLTKAERGGLSELDKAGFIKRQLVETRQITKH
VAQILDSRMNTKYDENDKLIREVKVITLKSKLVSDFRKDFQFYKVREINNYHHAHDAYLNAV
VGTALIKKYPKLESEFVYGDYKVYDVRKMIAKSEQEIGKATAKYFFYSNIMNFFKTEITLAN
GEIRKRPLIETNGETGEIVWDKGRDFATVRKVLSMPQVNIVKKTEVQTGGFSKESILPKRNS
DKLIARKKDWDPKKYGGFDSPTVAYSVLVVAKVEKGKSKKLKSVKELLGITIMERSSFEKNP
IDFLEAKGYKEVKKDLIIKLPKYSLFELENGRKRMLASAGELQKGNELALPSKYVNFLYLAS
HYEKLKGSPEDNEQKQLFVEQHKHYLDEIIEQISEFSKRVILADANLDKVLSAYNKHRDKPI
REQAENIIHLFTLTNLGAPAAFKYFDTTIDRKRYTSTKEVLDATLIHQSITGLYETRIDLSQ
LGGD

(see, e.g., Qi et al., “Repurposing CRISPR as an RNA-guided platform for sequence-specific control of gene expression.” Cell. 2013; 152(5):1173-83, the entire contents of which are incorporated herein by reference).

[0167] In some embodiments, a Cas9 nuclease has an inactive (e.g., an inactivated) DNA cleavage domain, that is, the Cas9 is a nickase, referred to as an “nCas9” protein (for “nickase” Cas9). A nuclease-inactivated Cas9 protein may interchangeably be referred to as a “dCas9” protein (for nuclease-“dead” Cas9) or catalytically inactive Cas9. Methods for generating a Cas9 protein (or a fragment thereof) having an inactive DNA cleavage domain are known (See, e.g., Jinek et al., Science. 337:816-821(2012); Qi et al., “Repurposing CRISPR as an RNA-Guided Platform for Sequence-Specific Control of Gene Expression” (2013) Cell. 28; 152(5):1173-83, the entire contents of each of which are incorporated herein by reference). For example, the DNA cleavage domain of Cas9 is known to include two subdomains, the HNH nuclease subdomain and the RuvC1 subdomain. The HNH subdomain cleaves the strand complementary to the gRNA, whereas the RuvC1 subdomain cleaves the non-complementary strand. Mutations within these subdomains can silence the nuclease activity of Cas9. For example, the mutations D10A and H840A completely inactivate the nuclease activity of S. pyogenes Cas9 (Jinek et al., Science. 337:816-821(2012); Qi et al., Cell. 28; 152(5):1173-83 (2013)).

[0168] In some embodiments, the dCas9 domain comprises an amino acid sequence that is at least 60%, at least 65%, at least 70%, at least 75%, at least 80%, at least 85%, at least 90%, at least 95%, at least 96%, at least 97%, at least 98%, at least 99%, or at least 99.5% identical to any one of the dCas9 domains provided herein. In some embodiments, the Cas9 domain comprises an amino acid sequences that has 1, 2, 3, 4, 5, 6, 7, 8, 9, 10, 11, 12, 13, 14, 15, 16, 17, 18, 19, 20, 21, 22, 21, 24, 25, 26, 27, 28, 29, 30, 31, 32, 33, 34, 35, 36, 37, 38, 39, 40, 41, 42, 43, 44, 45, 46, 47, 48, 49, 50 or more or more mutations compared to any one of the amino acid sequences set forth herein. In some embodiments, the Cas9 domain comprises an amino acid sequence that has at least 10, at least 15, at least 20, at least 30, at least 40, at least 50, at least 60, at least 70, at least 80, at least 90, at least 100, at least 150, at least 200, at least 250, at least 300, at least 350, at least 400, at least 500, at least 600, at least 700, at least 800, at least 900, at least 1000, at least 1100, or at least 1200 identical contiguous amino acid residues as compared to any one of the amino acid sequences set forth herein.

[0169] In some embodiments, dCas9 corresponds to, or comprises in part or in whole, a Cas9 amino acid sequence having one or more mutations that inactivate the Cas9 nuclease activity. For example, in some embodiments, a dCas9 domain comprises D10A and an H840A mutation or corresponding mutations in another Cas9.

[0170] In some embodiments, the dCas9 comprises the amino acid sequence of dCas9 (D10A and H840A):

MDKKYSIGLAIGTNSVGWAVITDEYKVPSKKFKVLGNTDRHSIKKNLIGALLFDSGETAEAT
RLKRTARRRYTRRKNRICYLQEIFSNEMAKVDDSFFHRLEESFLVEEDKKHERHPIFGNIVD
EVAYHEKYPTIYHLRKKLVDSTDKADLRLIYLALAHMIKFRGHFLIEGDLNPDNSDVDKLFI
QLVQTYNQLFEENPINASGVDAKAILSARLSKSRRLENLIAQLPGEKKNGLFGNLIALSLGL
TPNFKSNFDLAEDAKLQLSKDTYDDDLDNLLAQIGDQYADLFLAAKNLSDAILLSDILRVNT
EITKAPLSASMIKRYDEHHQDLTLLKALVRQQLPEKYKEIFFDQSKNGYAGYIDGGASQEEF
YKFIKPILEKMDGTEELLVKLNREDLLRKQRTFDNGSIPHQIHLGELHAILRRQEDFYPFLK
DNREKIEKILTFRIPYYVGPLARGNSRFAWMTRKSEETITPWNFEEVVDKGASAQSFIERMT
NFDKNLPNEKVLPKHSLLYEYFTVYNELTKVKYVTEGMRKPAFLSGEQKKAIVDLLFKTNRK
VTVKQLKEDYFKKIECFDSVEISGVEDRFNASLGTYHDLLKIIKDKDFLDNEENEDILEDIV
LTLTLFEDREMIEERLKTYAHLFDDKVMKQLKRRRYTGWGRLSRKLINGIRDKQSGKTILDF
LKSDGFANRNFMQLIHDDSLTFKEDIQKAQVSGQGDSLHEHIANLAGSPAIKKGILQTVKVV
DELVKVMGRHKPENIVIEMARENQTTQKGQKNSRERMKRIEEGIKELGSQILKEHPVENTQL
QNEKLYLYYLQNGRDMYVDQELDINRLSDYDVDAIVPQSFLKDDSIDNKVLTRSDKNRGKSD
NVPSEEVVKKMKNYWRQLLNAKLITQRKFDNLTKAERGGLSELDKAGFIKRQLVETRQITKH
VAQILDSRMNTKYDENDKLIREVKVITLKSKLVSDFRKDFQFYKVREINNYHHAHDAYLNAV
VGTALIKKYPKLESEFVYGDYKVYDVRKMIAKSEQEIGKATAKYFFYSNIMNFFKTEITLAN
GEIRKRPLIETNGETGEIVWDKGRDFATVRKVLSMPQVNIVKKTEVQTGGFSKESILPKRNS
IDFLEAKGYKEVKKDLIIKLPKYSLFELENGRKRMLASAGELQKGNELALPSKYVNFLYLAS
HYEKLKGSPEDNEQKQLFVEQHKHYLDEIIEQISEFSKRVILADANLDKVLSAYNKHRDKPI
REQAENIIHLFTLTNLGAPAAFKYFDTTIDRKRYTSTKEVLDATLIHQSITGLYETRIDLSQ
LGGD.

(single underline: HNH domain; double underline: RuvC domain)

[0171] In some embodiments, the Cas9 domain comprises a D10A mutation, while the residue at position 840 remains a histidine in the amino acid sequence provided above, or at corresponding positions in any of the amino acid sequences provided herein.

[0172] In other embodiments, dCas9 variants having mutations other than D10A and H840A are provided, which, e.g., result in nuclease inactivated Cas9 (dCas9). Such mutations, by way of example, include other amino acid substitutions at D10 and H840, or other substitutions within the nuclease domains of Cas9 (e.g., substitutions in the HNH nuclease subdomain and/or the RuvC1 subdomain). In some embodiments, variants or homologues of dCas9 are provided which are at least about 70% identical, at least about 80% identical, at least about 90% identical, at least about 95% identical, at least about 98% identical, at least about 99% identical, at least about 99.5% identical, or at least about 99.9% identical. In some embodiments, variants of dCas9 are provided having amino acid sequences which are shorter, or longer, by about 5 amino acids, by about 10 amino acids, by about 15 amino acids, by about 20 amino acids, by about 25 amino acids, by about 30 amino acids, by about 40 amino acids, by about 50 amino acids, by about 75 amino acids, by about 100 amino acids or more.

[0173] In some embodiments, the Cas9 domain is a Cas9 nickase. The Cas9 nickase may be a Cas9 protein that is capable of cleaving only one strand of a duplexed nucleic acid molecule (e.g., a duplexed DNA molecule). In some embodiments, the Cas9 nickase cleaves the target strand of a duplexed nucleic acid molecule, meaning that the Cas9 nickase cleaves the strand that is base paired to (complementary to) a gRNA (e.g., an sgRNA) that is bound to the Cas9. In some embodiments, a Cas9 nickase comprises a D10A mutation and has a histidine at position 840. In some embodiments, the Cas9 nickase cleaves the non-target, non-base-edited strand of a duplexed nucleic acid molecule, meaning that the Cas9 nickase cleaves the strand that is not base paired to a gRNA (e.g., an sgRNA) that is bound to the Cas9. In some embodiments, a Cas9 nickase comprises an H840A mutation and has an aspartic acid residue at position 10, or a corresponding mutation. In some embodiments, the Cas9 nickase comprises an amino acid sequence that is at least 60%, at least 65%, at least 70%, at least 75%, at least 80%, at least 85%, at least 90%, at least 95%, at least 96%, at least 97%, at least 98%, at least 99%, or at least 99.5% identical to any one of the Cas9 nickases provided herein. Additional suitable Cas9 nickases will be apparent to those of skill in the art based on this disclosure and knowledge in the field, and are within the scope of this disclosure.

[0174] The amino acid sequence of an exemplary catalytically Cas9 nickase (nCas9) is as follows:

MDKKYSIGLAIGTNSVGWAVITDEYKVPSKKFKVLGNTDRHSIKKNLIGALLFDSGETAEAT
RLKRTARRRYTRRKNRICYLQEIFSNEMAKVDDSFFHRLEESFLVEEDKKHERHPIFGNIVD
EVAYHEKYPTIYHLRKKLVDSTDKADLRLIYLALAHMIKFRGHFLIEGDLNPDNSDVDKLFI
QLVQTYNQLFEENPINASGVDAKAILSARLSKSRRLENLIAQLPGEKKNGLFGNLIALSLGL
TPNFKSNFDLAEDAKLQLSKDTYDDDLDNLLAQIGDQYADLFLAAKNLSDAILLSDILRVNT
EITKAPLSASMIKRYDEHHQDLTLLKALVRQQLPEKYKEIFFDQSKNGYAGYIDGGASQEEF
YKFIKPILEKMDGTEELLVKLNREDLLRKQRTFDNGSIPHQIHLGELHAILRRQEDFYPFLK
DNREKIEKILTFRIPYYVGPLARGNSRFAWMTRKSEETITPWNFEEVVDKGASAQSFIERMT
NFDKNLPNEKVLPKHSLLYEYFTVYNELTKVKYVTEGMRKPAFLSGEQKKAIVDLLFKTNRK
VTVKQLKEDYFKKIECFDSVEISGVEDRFNASLGTYHDLLKIIKDKDFLDNEENEDILEDIV
LTLTLFEDREMIEERLKTYAHLFDDKVMKQLKRRRYTGWGRLSRKLINGIRDKQSGKTILDF
LKSDGFANRNFMQLIHDDSLTFKEDIQKAQVSGQGDSLHEHIANLAGSPAIKKGILQTVKVV
DELVKVMGRHKPENIVIEMARENQTTQKGQKNSRERMKRIEEGIKELGSQILKEHPVENTQL
QNEKLYLYYLQNGRDMYVDQELDINRLSDYDVDHIVPQSFLKDDSIDNKVLTRSDKNRGKSD
NVPSEEVVKKMKNYWRQLLNAKLITQRKFDNLTKAERGGLSELDKAGFIKRQLVETRQITKH
VAQILDSRMNTKYDENDKLIREVKVITLKSKLVSDFRKDFQFYKVREINNYHHAHDAYLNAV
VGTALIKKYPKLESEFVYGDYKVYDVRKMIAKSEQEIGKATAKYFFYSNIMNFFKTEITLAN
GEIRKRPLIETNGETGEIVWDKGRDFATVRKVLSMPQVNIVKKTEVQTGGFSKESILPKRNS
DKLIARKKDWDPKKYGGFDSPTVAYSVLVVAKVEKGKSKKLKSVKELLGITIMERSSFEKNP
IDFLEAKGYKEVKKDLIIKLPKYSLFELENGRKRMLASAGELQKGNELALPSKYVNFLYLAS
HYEKLKGSPEDNEQKQLFVEQHKHYLDEIIEQISEFSKRVILADANLDKVLSAYNKHRDKPI
REQAENIIHLFTLTNLGAPAAFKYFDTTIDRKRYTSTKEVLDATLIHQSITGLYETRIDLSQ
LGGD

[0175] In some embodiments, Cas9 refers to a Cas9 from archaea (e.g., nanoarchaea), which constitute a domain and kingdom of single-celled prokaryotic microbes. In some embodiments, the programmable nucleotide binding protein may be a CasX or CasY protein, which have been described in, for example, Burstein et al., “New CRISPR-Cas systems from uncultivated microbes.” Cell Res. 2017 Feb. 21. doi: 10.1038/cr.2017.21, the entire contents of which is hereby incorporated by reference. Using genome-resolved metagenomics, a number of CRISPR-Cas systems were identified, including the first reported Cas9 in the archaeal domain of life. This divergent Cas9 protein was found in little-studied nanoarchaea as part of an active CRISPR-Cas system. In bacteria, two previously unknown systems were discovered, CRISPR-CasX and CRISPR-CasY, which are among the most compact systems yet discovered. In some embodiments, in a base editor system described herein Cas9 is replaced by CasX, or a variant of CasX. In some embodiments, in a base editor system described herein Cas9 is replaced by CasY, or a variant of CasY. It should be appreciated that other RNA-guided DNA binding proteins may be used as a nucleic acid programmable DNA binding protein (napDNAbp), and are within the scope of this disclosure.

[0176] In some embodiments, the nucleic acid programmable DNA binding protein (napDNAbp) of any of the fusion proteins provided herein may be a CasX or CasY protein. In some embodiments, the napDNAbp is a CasX protein. In some embodiments, the napDNAbp is a CasY protein. In some embodiments, the napDNAbp comprises an amino acid sequence that is at least 85%, at least 90%, at least 91%, at least 92%, at least 93%, at least 94%, at least 95%, at least 96%, at least 97%, at least 98%, at least 99%, or at ease 99.5% identical to a naturally-occurring CasX or CasY protein. In some embodiments, the programmable nucleotide binding protein is a naturally-occurring CasX or CasY protein. In some embodiments, the programmable nucleotide binding protein comprises an amino acid sequence that is at least 85%, at least 90%, at least 91%, at least 92%, at least 93%, at least 94%, at least 95%, at least 96%, at least 97%, at least 98%, at least 99%, or at ease 99.5% identical to any CasX or CasY protein described herein. It should be appreciated that CasX and CasY from other bacterial species may also be used in accordance with the present disclosure.

[0177] An exemplary CasX ((uniprot.org/uniprot/F0NN87; uniprot.org/uniprot/F0NH53) tr|F0NN87|F0NN87_SULIHCRISPR-associatedCasx protein OS=Sulfolobus islandicus (strain HVE10/4) GN=SiH_0402 PE=4 SV=1) amino acid sequence is as follows:

MEVPLYNIFGDNYIIQVATEAENSTIYNNKVEIDDEELRNVLNLAYKIAKNNEDAAAERRGK
AKKKKGEEGETTTSNIILPLSGNDKNPWTETLKCYNFPTTVALSEVFKNFSQVKECEEVSAP
SFVKPEFYEFGRSPGMVERTRRVKLEVEPHYLIIAAAGWVLTRLGKAKVSEGDYVGVNVFTP
TRGILYSLIQNVNGIVPGIKPETAFGLWIARKVVSSVTNPNVSVVRIYTISDAVGQNPTTIN
GGFSIDLTKLLEKRYLLSERLEAIARNALSISSNMRERYIVLANYIYEYLTGSKRLEDLLY
FANRDLIMNLNSDDGKVRDLKLISAYVNGELIRGEG.

[0178] An exemplary CasX (>tr|F0NH53|F0NH53_SULIR CRISPR associated protein, Casx OS=Sulfolobus islandicus (strain REY15A) GN=SiRe 0771 PE=4 SV=1) amino acid sequence is as follows:

MEVPLYNIFGDNYIIQVATEAENSTIYNNKVEIDDEELRNVLNLAYKIAKN
NEDAAAERRGKAKKKKGEEGETTTSNIILPLSGNDKNPWTETLKCYNFPTT
VALSEVFKNFSQVKECEEVSAPSFVKPEFYKFGRSPGMVERTRRVKLEVEP
HYLIMAAAGWVLTRLGKAKVSEGDYVGVNVFTPTRGILYSLIQNVNGIVPG
IKPETAFGLWIARKVVSSVTNPNVSVVSIYTISDAVGQNPTTINGGFSIDL
TKLLEKRDLLSERLEAIARNALSISSNMRERYIVLANYIYEYLTGSKRLED
LLYFANRDLIMNLNSDDGKVRDLKLISAYVNGELIRGEG.

[0179] Deltaproteobacteria CasX

MEKRINKIRKKLSADNATKPVSRSGPMKTLLVRVMTDDLKKRLEKRRKKPE
VMPQVISNNAANNLRMLLDDYTKMKEAILQVYWQEFKDDHVGLMCKFAQPA
SKKIDQNKLKPEMDEKGNLTTAGFACSQCGQPLFVYKLEQVSEKGKAYTNY
FGRCNVAEHEKLILLAQLKPVKDSDEAVTYSLGKFGQRALDFYSIHVTKES
THPVKPLAQIAGNRYASGPVGKALSDACMGTIASFLSKYQDIIIEHQKVVK
GNQKRLESLRELAGKENLEYPSVTLPPQPHTKEGVDfAYNEVIARVRMWVN
LNLWQKLKLSRDDAKPLLRLKGFPSFPVVERRENEVDWWNTINEVKKLIDA
KRDMGRVFWSGVTAEKRNTILEGYNYLPNENDHKKREGSLENPKKPAKRQF
GDLLLYLEKKYAGDWGKVFDEAWERIDKKIAGLTSHIEREEARNAEDAQSK
AVLTDWLRAKASFVLERLKEMDEKEFYACEIQLQKWYGDLRGNPFAVEAEN
RVVDISGFSIGSDGHSIQYRNLLAWKYLENGKREFYLLMNYGKKGRIRFTD
GTDIKKSGKWQGLLYGGGKAKVIDLTFDPDDEQLIILPLAFGTRQGREFIW
NDLLSLETGLIKLANGRVIEKTIYNKKIGRDEPALFVALTFERREVVDPSN
IKPVNLIGVARGENIPAVIALTDPEGCPLPEFKDSSGGPTDILRIGEGYKE
KQRAIQAAKEVEQRRAGGYSRKFASKSRNLADDMVRNSARDLFYHAVTHDA
VLVFANLSRGFGRQGKRTFMTERQYTKMEDWLTAKLAYEGLTSKTYLSKTL
AQYTSKTCSNCGFTITYADMDVMLVRLKKTSDGWATTLNNKELKAEYQITY
YNRYKRQTVEKELSAELDRLSEESGNNDISKWTKGRRDEALFLLKKRFSHR
PVQEQFVCLDCGHEVHAAEQAALNIARSWLFLNSNSTEFKSYKSGKQPFVG
AWQAFYKRRLKEVWKPNA

[0180] An exemplary CasY ((ncbi.nlm.nih.gov/protein/APG80656.1)>APG80656.1 CRISPR-associated protein CasY [uncultured Parcubacteria group bacterium]) amino acid sequence is as follows:

MSKRHPRISGVKGYRLHAQRLEYTGKSGAMRTIKYPLYSSPSGGRTVPREI
VSAINDDYVGLYGLSNFDDLYNAEKRNEEKVYSVLDFWYDCVQYGAVFSYT
APGLLKNVAEVRGGSYELTKTLKGSHLYDELQIDKVIKFLNKKEISRANGS
LDKLKKDIIDCFKAEYRERHKDQCNKLADDIKNAKKDAGASLGERQKKLFR
DFFGISEQSENDKPSFTNPLNLTCCLLPFDTVNNNRNRGEVLFNKLKEYAQ
KLDKNEGSLEMWEYIGIGNSGTAFSNFLGEGFLGRLRENKITELKKAMMDI
TDAWRGQEQEEELEKRLRILAALTIKLREPKFDNHWGGYRSDINGKLSSWL
QNYINQTVKIKEDLKGHKKDLKKAKEMINRFGESDTKEEAVVSSLLESIEK
IVPDDSADDEKPDIPAIAIYRRFLSDGRLTLNRFVQREDVQEALIKERLEA
EKKKKPKKRKKKSDAEDEKETIDFKELFPHLAKPLKLVPNFYGDSKRELYK
KYKNAAIYTDALWKAVEKIYKSAFSSSLKNSFFDTDFDKDFFIKRLQKIFS
VYRRFNTDKWKPIVKNSFAPYCDIVSLAENEVLYKPKQSRSRKSAAIDKNR
VRLPSTENIAKAGIALARELSVAGFDWKDLLKKEEHEEYIDLIELHKTALA
LLLAVTETQLDISALDFVENGTVKDFMKTRDGNLVLEGRFLEMFSQSIVFS
ELRGLAGLMSRKEFITRSAIQTMNGKQAELLYIPHEFQSAKITTPKEMSRA
FLDLAPAEFATSLEPESLSEKSLLKLKQMRYYPHYFGYELTRTGQGIDGGV
AENALRLEKSPVKKREIKCKQYKTLGRGQNKIVLYVRSSYYQTQFLEWFLH
RPKNVQTDVAVSGSFLIDEKKVKTRWNYDALTVALEPVSGSERVFVSQPFT
IFPEKSAEEEGQRYLGIDIGEYGIAYTALEITGDSAKILDQNFISDPQLKT
LREEVKGLKLDQRRGTFAMPSTKIARIRESLVHSLRNRIHHLALKHKAKIV
YELEVSRFEEGKQKIKKVYATLKKADVYSEIDADKNLQTTVWGKLAVASEI
SASYTSQFCGACKKLWRAEMQVDETITTQELIGTVRVIKGGTLIDAIKDFM
RPPIFDENDTPFPKYRDFCDKHHISKKMRGNSCLFICPFCRANADADIQAS
QTIALLRYVKEEKKVEDYFERFRKLKNIKVLGQMKKI.

[0181] In some embodiments, the nucleic acid programmable DNA binding protein (napDNAbp) is a single effector of a microbial CRISPR-Cas system. Single effectors of microbial CRISPR-Cas systems include, without limitation, Cas9, Cas12a/Cpf1, Cas12b/C2c1, Cas12c/C2c3, Cas12d/CasY, Cas12e/CasX, Cas12g, Cas12h, and Cas12i. Typically, microbial CRISPR-Cas systems are divided into Class 1 and Class 2 systems. Class 1 systems have multisubunit effector complexes, while Class 2 systems have a single protein effector. For example, Cas9 and Cpf1 are Class 2 effectors. In addition to Cas9 and Cpf1, three distinct Class 2 CRISPR-Cas systems (Cas12b/C2c1, and Cas12c/C2c3) have been described by Shmakov et al., “Discovery and Functional Characterization of Diverse Class 2 CRISPR Cas Systems”, Mol. Cell, 2015 Nov. 5; 60(3): 385-397, the entire contents of which is hereby incorporated by reference. Effectors of two of the systems, Cas12b/C2c1, and Cas12c/C2c3, contain RuvC-like endonuclease domains related to Cpf1. A third system, contains an effector with two predicated HEPN RNase domains. Production of mature CRISPR RNA is tracrRNA-independent, unlike production of CRISPR RNA by Cas12b/C2c1. Cas12b/C2c1 depends on both CRISPR RNA and tracrRNA for DNA cleavage.

[0182] The crystal structure of Alicyclobaccillus acidoterrastris Cas12b/C2c1 (AacC2c1) has been reported in complex with a chimeric single-molecule guide RNA (sgRNA). See e.g., Liu et al., “C2c1-sgRNA Complex Structure Reveals RNA-Guided DNA Cleavage Mechanism”, Mol. Cell, 2017 Jan. 19; 65(2):310-322, the entire contents of which are hereby incorporated by reference. The crystal structure has also been reported in Alicyclobacillus acidoterrestris C2c1 bound to target DNAs as ternary complexes. See e.g., Yang et al., “PAM-dependent Target DNA Recognition and Cleavage by C2C1 CRISPR-Cas endonuclease”, Cell, 2016 Dec. 15; 167(7):1814-1828, the entire contents of which are hereby incorporated by reference. Catalytically competent conformations of AacC2c1, both with target and non-target DNA strands, have been captured independently positioned within a single RuvC catalytic pocket, with Cas12b/C2c1-mediated cleavage resulting in a staggered seven-nucleotide break of target DNA. Structural comparisons between Cas12b/C2c1 ternary complexes and previously identified Cas9 and Cpf1 counterparts demonstrate the diversity of mechanisms used by CRISPR-Cas9 systems.

[0183] In some embodiments, the nucleic acid programmable DNA binding protein (napDNAbp) of any of the fusion proteins provided herein may be a Cas12b/C2c1, or a Cas12c/C2c3 protein. In some embodiments, the napDNAbp is a Cas12b/C2c1 protein. In some embodiments, the napDNAbp is a Cas12c/C2c3 protein. In some embodiments, the napDNAbp comprises an amino acid sequence that is at least 85%, at least 90%, at least 91%, at least 92%, at least 93%, at least 94%, at least 95%, at least 96%, at least 97%, at least 98%, at least 99%, or at ease 99.5% identical to a naturally-occurring Cas12b/C2c1 or Cas12c/C2c3 protein. In some embodiments, the napDNAbp is a naturally-occurring Cas12b/C2c1 or Cas12c/C2c3 protein. In some embodiments, the napDNAbp comprises an amino acid sequence that is at least 85%, at least 90%, at least 91%, at least 92%, at least 93%, at least 94%, at least 95%, at least 96%, at least 97%, at least 98%, at least 99%, or at ease 99.5% identical to any one of the napDNAbp sequences provided herein. It should be appreciated that Cas12b/C2c1 or Cas12c/C2c3 from other bacterial species may also be used in accordance with the present disclosure.

[0184] A Cas12b/C2c1 ((uniprot.org/uniprot/T0D7A2#2) sp|T0D7A2|C2C1 ALIAG CRISPR-associated endonuclease C2c1 OS=Alicyclobacillus acido-terrestris (strain ATCC 49025/DSM 3922/CIP 106132/NCIMB 13137/GD3B) GN=c2c1 PE=1 SV=1) amino acid sequence is as follows:

MAVKSIKVKLRLDDMPEIRAGLWKLHKEVNAGVRYYTEWLSLLRQENLYRR
SPNGDGEQECDKTAEECKAELLERLRARQVENGHRGPAGSDDELLQLARQL
YELLVPQAIGAKGDAQQIARKFLSPLADKDAVGGLGIAKAGNKPRWVRMRE
AGEPGWEEEKEKAETRKSADRTADVLRALADFGLKPLMRVYTDSEMSSVEW
KPLRKGQAVRTWDRDMFQQAIERMMSWESWNQRVGQEYAKLVEQKNRFEQK
NFVGQEHLVHLVNQLQQDMKEASPGLESKEQTAHYVTGRALRGSDKVFEKW
GKLAPDAPFDLYDAEIKNVQRRNTRRFGSHDLFAKLAEPEYQALWREDASF
LTRYAVYNSILRKLNHAKMFATFTLPDATAHPIWTRFDKLGGNLHQYTFLF
NEFGERRHAIRFHKLLKVENGVAREVDDVTVPISMSEQLDNLLPRDPNEPI
ALYFRDYGAEQHFTGEFGGAKIQCRRDQLAHMHRRRGARDVYLNVSVRVQS
QSEARGERRPPYAAVFRLVGDNHRAFVHFDKLSDYLAEHPDDGKLGSEGLL
SGLRVMSVDLGLRTSASISVFRVARKDELKPNSKGRVPFFFPIKGNDNLVA
VHERSQLLKLPGETESKDLRAIREERQRTLRQLRTQLAYLRLLVRCGSEDV
GRRERSWAKLIEQPVDAANHMTPDWREAFENELQKLKSLHGICSDKEWMDA
VYESVRRVWRHMGKQVRDWRKDVRSGERPKIRGYAKDVVGGNSIEQIEYLE
RQYKFLKSWSFFGKVSGQVIRAEKGSRFAITLREHIDHAKEDRLKKLADRI
IMEALGYVYALDERGKGKWVAKYPPCQLILLEELSEYQFNNDRPPSENNQL
MQWSHRGVFQELINQAQVHDLLVGTMYAAFSSRFDARTGAPGIRCRRVPAR
CTQEHNPEPFPWWLNKFVVEHTLDACPLRADDLIPTGEGEIFVSPFSAEEG
DFHQIHADLNAAQNLQQRLWSDFDISQIRLRCDWGEVDGELVLIPRLTGKR
TADSYSNKVFYTNTGVTYYERERGKKRRKVFAQEKLSEEEAELLVEADEAR
EKSVVLMRDPSGIINRGNWTRQKEFWSMVNQRIEGYLVKQIRSRVPLQDSA
CENTGDI.

[0185] BhCas12b (Bacillus hisashii) NCBI Reference Sequence: WP 095142515

MAPKKKRKVGIHGVPAAATRSFILKIEPNEEVKKGLWKTHEVLNHGIAYYM
NILKLIRQEAIYEHHEQDPKNPKKVSKAEIQAELWDFVLKMQKCNSFTHEV
DKDEVFNILRELYEELVPSSVEKKGEANQLSNKFLYPLVDPNSQSGKGTAS
SGRKPRWYNLKIAGDPSWEEEKKKWEEDKKKDPLAKILGKLAEYGLIPLFI
PYTDSNEPIVKEIKWMEKSRNQSVRRLDKDMFIQALERFLSWESWNLKVKE
EYEKVEKEYKTLEERIKEDIQALKALEQYEKERQEQLLRDTLNTNEYRLSK
RGLRGWREIIQKWLKMDENEPSEKYLEVFKDYQRKHPREAGDYSVYEFLSK
KENHFIWRNHPEYPYLYATFCEIDKKKKDAKQQATFTLADPINHPLWVRFE
ERSGSNLNKYRILTEQLHTEKLKKKLTVQLDRLIYPTESGGWEEKGKVDIV
LLPSRQFYNQIFLDIEEKGKHAFTYKDESIKFPLKGTLGGARVQFDRDHLR
RYPHKVESGNVGRIYFNMTVNIEPTESPVSKSLKIHRDDFPKVVNFKPKEL
TEWIKDSKGKKLKSGIESLEIGLRVMSIDLGQRQAAAASIFEVVDQKPDIE
GKLFFPIKGTELYAVHRASFNIKLPGETLVKSREVLRKAREDNLKLMNQKL
NFLRNVLHFQQFEDITEREKRVTKWISRQENSDVPLVYQDELIQIRELMYK
PYKDWVAFLKQLHKRLEVEIGKEVKHWRKSLSDGRKGLYGISLKNIDEIDR
TRKFLLRWSLRPTEPGEVRRLEPGQRFAIDQLNHLNALKEDRLKKMANTII
MHALGYCYDVRKKKWQAKNPACQIILFEDLSNYNPYEERSRFENSKLMKWS
RREIPRQVALQGEIYGLQVGEVGAQFSSRFHAKTGSPGIRCSVVTKEKLQD
NRFFKNLQREGRLTLDKIAVLKEGDLYPDKGGEKFISLSKDRKCVTTHADI
NAAQNLQKRFWTRTHGFYKVYCKAYQVDGQTVYIPESKDQKQKIIEEFGEG
YFILKDGVYEWVNAGKLKIKKGSSKQSSSELVDSDILKDSFDLASELKGEK
LMLYRDPSGNVFPSDKWMAAGVFFGKLERILISKLTNQYSISTIEDDSSKQ
SMKRPAATKKAGQAKKKK

[0186] In some embodiments, the Cas12b is BvCas12B, which is a variant of BhCas12b and comprises the following changes relative to BhCas12B: S893R, K846R, and E837G. BvCas12b (Bacillus sp. V3-13) NCBI Reference Sequence: WP 101661451.1

MAIRSIKLKMKTNSGTDSIYLRKALWRTHQLINEGIAYYMNLLTLYRQEAI
GDKTKEAYQAELINIIRNQQRNNGSSEEHGSDQEILALLRQLYELIIPSSI
GESGDANQLGNKFLYPLVDPNSQSGKGTSNAGRKPRWKRLKEEGNPDWELE
KKKDEERKAKDPTVKIFDNLNKYGLLPLFPLFTNIQKDIEWLPLGKRQSVR
KWDKDMFIQAIERLLSWESWNRRVADEYKQLKEKTESYYKEHLTGGEEWIE
KIRKFEKERNMELEKNAFAPNDGYFITSRQIRGWDRVYEKWSKLPESASPE
ELWKVVAEQQNKMSEGFGDPKVFSFLANRENRDIWRGHSERIYHIAAYNGL
QKKLSRTKEQATFTLPDAIEHPLWIRYESPGGTNLNLFKLEEKQKKNYYVT
LSKIIWPSEEKWIEKENIEIPLAPSIQFNRQIKLKQHVKGKQEISFSDYSS
RISLDGVLGGSRIQFNRKYIKNHKELLGEGDIGPVFFNLVVDVAPLQETRN
GRLQSPIGKALKVISSDFSKVIDYKPKELMDWMNTGSASNSFGVASLLEGM
RVMSIDMGQRTSASVSIFEVVKELPKDQEQKLFYSINDTELFAIHKRSFLL
NLPGEVVTKNNKQQRQERRKKRQFVRSQIRMLANVLRLETKKTPDERKKAI
HKLMEIVQSYDSWTASQKEVWEKELNLLTNMAAFNDEIWKESLVELHHRIE
PYVGQIVSKWRKGLSEGRKNLAGISMWNIDELEDTRRLLISWSKRSRTPGE
ANRIETDEPFGSSLLQHIQNVKDDRLKQMANLIIMTALGFKYDKEEKDRYK
RWKETYPACQIILFENLNRYLFNLDRSRRENSRLMKWAHRSIPRTVSMQGE
MFGLQVGDVRSEYSSRFHAKTGAPGIRCHALTEEDLKAGSNTLKRLIEDGF
INESELAYLKKGDIIPSQGGELFVTLSKRYKKDSDNNELTVIHADINAAQN
LQKRFWQQNSEVYRVPCQLARMGEDKLYIPKSQTETIKKYFGKGSFVKNNT
EQEVYKWEKSEKMKIKTDTTFDLQDLDGFEDISKTIELAQEQQKKYLTMFR
DPSGYFFNNETWRPQKEYWSIVNNIIKSCLKKKILSNKVEL

[0187] The Cas9 nuclease has two functional endonuclease domains: RuvC and HNH. Cas9 undergoes a conformational change upon target binding that positions the nuclease domains to cleave opposite strands of the target DNA. The end result of Cas9-mediated DNA cleavage is a double-strand break (DSB) within the target DNA (˜3-4 nucleotides upstream of the PAM sequence). The resulting DSB is then repaired by one of two general repair pathways: (1) the efficient but error-prone non-homologous end joining (NHEJ) pathway; or (2) the less efficient but high-fidelity homology directed repair (HDR) pathway.

[0188] The “efficiency” of non-homologous end joining (NHEJ) and/or homology directed repair (HDR) can be calculated by any convenient method. For example, in some cases, efficiency can be expressed in terms of percentage of successful HDR. For example, a surveyor nuclease assay can be used to generate cleavage products and the ratio of products to substrate can be used to calculate the percentage. For example, a surveyor nuclease enzyme can be used that directly cleaves DNA containing a newly integrated restriction sequence as the result of successful HDR. More cleaved substrate indicates a greater percent HDR (a greater efficiency of HDR). As an illustrative example, a fraction (percentage) of HDR can be calculated using the following equation [(cleavage products)/(substrate plus cleavage products)] (e.g., (b+c)/(a+b+c), where “a” is the band intensity of DNA substrate and “b” and “c” are the cleavage products).

[0189] In some cases, efficiency can be expressed in terms of percentage of successful NHEJ. For example, a T7 endonuclease I assay can be used to generate cleavage products and the ratio of products to substrate can be used to calculate the percentage NHEJ. T7 endonuclease Icleaves mismatched heteroduplex DNA which arises from hybridization of wild-type and mutant DNA strands (NHEJ generates small random insertions or deletions (indels) at the site of the original break). More cleavage indicates a greater percent NHEJ (a greater efficiency of NHEJ). As an illustrative example, a fraction (percentage) of NHEJ can be calculated using the following equation: (1−(1−(b+c)/(a+b+c))^{1/2})×100, where “a” is the band intensity of DNA substrate and “b” and “c” are the cleavage products (Ran et. al., Cell. 2013 Sep. 12; 154(6):1380-9; and Ran et al., Nat Protoc. 2013 November; 8(11): 2281-2308).

[0190] The NHEJ repair pathway is the most active repair mechanism, and it frequently causes small nucleotide insertions or deletions (indels) at the DSB site. The randomness of NHEJ-mediated DSB repair has important practical implications, because a population of cells expressing Cas9 and a gRNA or a guide polynucleotide can result in a diverse array of mutations. In most cases, NHEJ gives rise to small indels in the target DNA that result in amino acid deletions, insertions, or frameshift mutations leading to premature stop codons within the open reading frame (ORF) of the targeted gene. The ideal end result is a loss-of-function mutation within the targeted gene.

[0191] While NHEJ-mediated DSB repair often disrupts the open reading frame of the gene, homology directed repair (HDR) can be used to generate specific nucleotide changes ranging from a single nucleotide change to large insertions like the addition of a fluorophore or tag.

[0192] In order to utilize HDR for gene editing, a DNA repair template containing the desired sequence can be delivered into the cell type of interest with the gRNA(s) and Cas9 or Cas9 nickase. The repair template can contain the desired edit as well as additional homologous sequence immediately upstream and downstream of the target (termed left & right homology arms). The length of each homology arm can be dependent on the size of the change being introduced, with larger insertions requiring longer homology arms. The repair template can be a single-stranded oligonucleotide, double-stranded oligonucleotide, or a double-stranded DNA plasmid. The efficiency of HDR is generally low (<10% of modified alleles) even in cells that express Cas9, gRNA and an exogenous repair template. The efficiency of HDR can be enhanced by synchronizing the cells, since HDR takes place during the S and G2 phases of the cell cycle. Chemically or genetically inhibiting genes involved in NHEJ can also increase HDR frequency.

[0193] In some embodiments, Cas9 is a modified Cas9. A given gRNA targeting sequence can have additional sites throughout the genome where partial homology exists. These sites are called off-targets and need to be considered when designing a gRNA. In addition to optimizing gRNA design, CRISPR specificity can also be increased through modifications to Cas9. Cas9 generates double-strand breaks (DSBs) through the combined activity of two nuclease domains, RuvC and HNH. Cas9 nickase, a D10A mutant of SpCas9, retains one nuclease domain and generates a DNA nick rather than a DSB. The nickase system can also be combined with HDR-mediated gene editing for specific gene edits.

[0194] In some cases, Cas9 is a variant Cas9 protein. A variant Cas9 polypeptide has an amino acid sequence that is different by one amino acid (e.g., has a deletion, insertion, substitution, fusion) when compared to the amino acid sequence of a wild type Cas9 protein. In some instances, the variant Cas9 polypeptide has an amino acid change (e.g., deletion, insertion, or substitution) that reduces the nuclease activity of the Cas9 polypeptide. For example, in some instances, the variant Cas9 polypeptide has less than 50%, less than 40%, less than 30%, less than 20%, less than 10%, less than 5%, or less than 1% of the nuclease activity of the corresponding wild-type Cas9 protein. In some cases, the variant Cas9 protein has no substantial nuclease activity. When a subject Cas9 protein is a variant Cas9 protein that has no substantial nuclease activity, it can be referred to as “dCas9.”

[0195] In some cases, a variant Cas9 protein has reduced nuclease activity. For example, a variant Cas9 protein exhibits less than about 20%, less than about 15%, less than about 10%, less than about 5%, less than about 1%, or less than about 0.1%, of the endonuclease activity of a wild-type Cas9 protein, e.g., a wild-type Cas9 protein.

[0196] In some cases, a variant Cas9 protein can cleave the complementary strand of a guide target sequence but has reduced ability to cleave the non-complementary strand of a double stranded guide target sequence. For example, the variant Cas9 protein can have a mutation (amino acid substitution) that reduces the function of the RuvC domain. As a non-limiting example, in some embodiments, a variant Cas9 protein has a D10A (aspartate to alanine at amino acid position 10) and can therefore cleave the complementary strand of a double stranded guide target sequence but has reduced ability to cleave the non-complementary strand of a double stranded guide target sequence (thus resulting in a single strand break (SSB) instead of a double strand break (DSB) when the variant Cas9 protein cleaves a double stranded target nucleic acid) (see, for example, Jinek et al., Science. 2012 Aug. 17; 337(6096):816-21).

[0197] In some cases, a variant Cas9 protein can cleave the non-complementary strand of a double stranded guide target sequence but has reduced ability to cleave the complementary strand of the guide target sequence. For example, the variant Cas9 protein can have a mutation (amino acid substitution) that reduces the function of the HNH domain (RuvC/HNH/RuvC domain motifs). As a non-limiting example, in some embodiments, the variant Cas9 protein has an H840A (histidine to alanine at amino acid position 840) mutation and can therefore cleave the non-complementary strand of the guide target sequence but has reduced ability to cleave the complementary strand of the guide target sequence (thus resulting in a SSB instead of a DSB when the variant Cas9 protein cleaves a double stranded guide target sequence). Such a Cas9 protein has a reduced ability to cleave a guide target sequence (e.g., a single stranded guide target sequence) but retains the ability to bind a guide target sequence (e.g., a single stranded guide target sequence).

[0198] In some cases, a variant Cas9 protein has a reduced ability to cleave both the complementary and the non-complementary strands of a double stranded target DNA. As a non-limiting example, in some cases, the variant Cas9 protein harbors both the D10A and the H840A mutations such that the polypeptide has a reduced ability to cleave both the complementary and the non-complementary strands of a double stranded target DNA. Such a Cas9 protein has a reduced ability to cleave a target DNA (e.g., a single stranded target DNA) but retains the ability to bind a target DNA (e.g., a single stranded target DNA).

[0199] As another non-limiting example, in some cases, the variant Cas9 protein harbors W476A and W1126A mutations such that the polypeptide has a reduced ability to cleave a target DNA. Such a Cas9 protein has a reduced ability to cleave a target DNA (e.g., a single stranded target DNA) but retains the ability to bind a target DNA (e.g., a single stranded target DNA).

[0200] As another non-limiting example, in some cases, the variant Cas9 protein harbors P475A, W476A, N477A, D1125A, W1126A, and D1127A mutations such that the polypeptide has a reduced ability to cleave a target DNA. Such a Cas9 protein has a reduced ability to cleave a target DNA (e.g., a single stranded target DNA) but retains the ability to bind a target DNA (e.g., a single stranded target DNA).

[0201] As another non-limiting example, in some cases, the variant Cas9 protein harbors H840A, W476A, and W1126A, mutations such that the polypeptide has a reduced ability to cleave a target DNA. Such a Cas9 protein has a reduced ability to cleave a target DNA (e.g., a single stranded target DNA) but retains the ability to bind a target DNA (e.g., a single stranded target DNA). As another non-limiting example, in some cases, the variant Cas9 protein harbors H840A, D10A, W476A, and W1126A, mutations such that the polypeptide has a reduced ability to cleave a target DNA. Such a Cas9 protein has a reduced ability to cleave a target DNA (e.g., a single stranded target DNA) but retains the ability to bind a target DNA (e.g., a single stranded target DNA). In some embodiments, the variant Cas9 has restored catalytic His residue at position 840 in the Cas9 HNH domain (A840H).

[0202] As another non-limiting example, in some cases, the variant Cas9 protein harbors, H840A, P475A, W476A, N477A, D1125A, W1126A, and D1127A mutations such that the polypeptide has a reduced ability to cleave a target DNA. Such a Cas9 protein has a reduced ability to cleave a target DNA (e.g., a single stranded target DNA) but retains the ability to bind a target DNA (e.g., a single stranded target DNA). As another non-limiting example, in some cases, the variant Cas9 protein harbors D10A, H840A, P475A, W476A, N477A, D1125A, W1126A, and D1127A mutations such that the polypeptide has a reduced ability to cleave a target DNA. Such a Cas9 protein has a reduced ability to cleave a target DNA (e.g., a single stranded target DNA) but retains the ability to bind a target DNA (e.g., a single stranded target DNA). In some cases, when a variant Cas9 protein harbors W476A and W1126A mutations or when the variant Cas9 protein harbors P475A, W476A, N477A, D1125A, W1126A, and D1127A mutations, the variant Cas9 protein does not bind efficiently to a PAM sequence. Thus, in some such cases, when such a variant Cas9 protein is used in a method of binding, the method does not require a PAM sequence. In other words, in some cases, when such a variant Cas9 protein is used in a method of binding, the method can include a guide RNA, but the method can be performed in the absence of a PAM sequence (and the specificity of binding is therefore provided by the targeting segment of the guide RNA). Other residues can be mutated to achieve the above effects (i.e., inactivate one or the other nuclease portions). As non-limiting examples, residues D10, G12, G17, E762, H840, N854, N863, H982, H983, A984, D986, and/or A987 can be altered (i.e., substituted). Also, mutations other than alanine substitutions are suitable.

[0203] In some embodiments, a variant Cas9 protein that has reduced catalytic activity (e.g., when a Cas9 protein has a D10, G12, G17, E762, H840, N854, N863, H982, H983, A984, D986, and/or a A987 mutation, e.g., D10A, G12A, G17A, E762A, H840A, N854A, N863A, H982A, H983A, A984A, and/or D986A), the variant Cas9 protein can still bind to target DNA in a site-specific manner (because it is still guided to a target DNA sequence by a guide RNA) as long as it retains the ability to interact with the guide RNA.

[0204] In some embodiments, the variant Cas protein can be spCas9, spCas9-VRQR, spCas9-VRER, xCas9 (sp), saCas9, saCas9-KKH, spCas9-MQKSER, spCas9-LRKIQK, or spCas9-LRVSQL.

[0205] Alternatives to S. pyogenes Cas9 can include RNA-guided endonucleases from the Cpf1 family that display cleavage activity in mammalian cells. CRISPR from Prevotella and Francisella 1 (CRISPR/Cpf1) is a DNA-editing technology analogous to the CRISPR/Cas9 system. Cpf1 is an RNA-guided endonuclease of a class II CRISPR/Cas system. This acquired immune mechanism is found in Prevotella and Francisella bacteria. Cpf1 genes are associated with the CRISPR locus, coding for an endonuclease that use a guide RNA to find and cleave viral DNA. Cpf1 is a smaller and simpler endonuclease than Cas9, overcoming some of the CRISPR/Cas9 system limitations. Unlike Cas9 nucleases, the result of Cpf1-mediated DNA cleavage is a double-strand break with a short 3′ overhang. Cpf1's staggered cleavage pattern can open up the possibility of directional gene transfer, analogous to traditional restriction enzyme cloning, which can increase the efficiency of gene editing. Like the Cas9 variants and orthologues described above, Cpf1 can also expand the number of sites that can be targeted by CRISPR to AT-rich regions or AT-rich genomes that lack the NGG PAM sites favored by SpCas9. The Cpf1 locus contains a mixed alpha/beta domain, a RuvC-I followed by a helical region, a RuvC-II and a zinc finger-like domain. The Cpf1 protein has a RuvC-like endonuclease domain that is similar to the RuvC domain of Cas9. Furthermore, Cpf1 does not have a HNH endonuclease domain, and the N-terminal of Cpf1 does not have the alpha-helical recognition lobe of Cas9. Cpf1 CRISPR-Cas domain architecture shows that Cpf1 is functionally unique, being classified as Class 2, type V CRISPR system. The Cpf1 loci encode Cas1, Cas2 and Cas4 proteins more similar to types I and III than from type II systems. Functional Cpf1 doesn't need the trans-activating CRISPR RNA (tracrRNA), therefore, only CRISPR (crRNA) is required. This benefits genome editing because Cpf1 is not only smaller than Cas9, but also it has a smaller sgRNA molecule (proximately half as many nucleotides as Cas9). The Cpf1-crRNA complex cleaves target DNA or RNA by identification of a protospacer adjacent motif 5′-YTN-3′ in contrast to the G-rich PAM targeted by Cas9. After identification of PAM, Cpf1 introduces a sticky-end-like DNA double-stranded break of 4 or 5 nucleotides overhang.

[0206] Some aspects of the disclosure provide fusion proteins comprising domains that act as nucleic acid programmable DNA binding proteins, which may be used to guide a protein, such as a base editor, to a specific nucleic acid (e.g., DNA or RNA) sequence. In particular embodiments, a fusion protein comprises a nucleic acid programmable DNA binding protein domain and a deaminase domain. DNA binding proteins include, without limitation, Cas9 (e.g., dCas9 and nCas9), Cas12a/Cpf1, Cas12b/C2c1, Cas12c/C2c3, Cas12d/CasY, Cas12e/CasX, Cas12g, Cas12h, and Cas12i. One example of a programmable polynucleotide-binding protein that has different PAM specificity than Cas9 is Clustered Regularly Interspaced Short Palindromic Repeats from Prevotella and Francisella1 (Cpf1). Similar to Cas9, Cpf1 is also a class 2 CRISPR effector. It has been shown that Cpf1 mediates robust DNA interference with features distinct from Cas9. Cpf1 is a single RNA-guided endonuclease lacking tracrRNA, and it utilizes a T-rich protospacer-adjacent motif (TTN, TTTN, or YTN). Moreover, Cpf1 cleaves DNA via a staggered DNA double-stranded break. Out of 16 Cpf1-family proteins, two enzymes from Acidaminococcus and Lachnospiraceae are shown to have efficient genome-editing activity in human cells. Cpf1 proteins are known in the art and have been described previously, for example Yamano et al., “Crystal structure of Cpf1 in complex with guide RNA and target DNA.” Cell (165) 2016, p. 949-962; the entire contents of which is hereby incorporated by reference.

[0207] Also useful in the present compositions and methods are nuclease-inactive Cpf1 (dCpf1) variants that may be used as a guide nucleotide sequence-programmable polynucleotide-binding protein domain. The Cpf1 protein has a RuvC-like endonuclease domain that is similar to the RuvC domain of Cas9 but does not have a HNH endonuclease domain, and the N-terminal of Cpf1 does not have the alfa-helical recognition lobe of Cas9. It was shown in Zetsche et al., Cell, 163, 759-771, 2015 (which is incorporated herein by reference) that, the RuvC-like domain of Cpf1 is responsible for cleaving both DNA strands and inactivation of the RuvC-like domain inactivates Cpf1 nuclease activity. For example, mutations corresponding to D917A, E1006A, or D1255A in Francisella novicida Cpf1 inactivate Cpf1 nuclease activity. In some embodiments, the dCpf1 of the present disclosure comprises mutations corresponding to D917A, E1006A, D1255A, D917A/E1006A, D917A/D1255A, E1006A/D1255A, or D917A/E1006A/D1255A. It is to be understood that any mutations, e.g., substitution mutations, deletions, or insertions that inactivate the RuvC domain of Cpf1, may be used in accordance with the present disclosure.

[0208] In some embodiments, the nucleic acid programmable nucleotide binding protein of any of the fusion proteins provided herein may be a Cpf1 protein. In some embodiments, the Cpf1 protein is a Cpf1 nickase (nCpf1). In some embodiments, the Cpf1 protein is a nuclease inactive Cpf1 (dCpf1). In some embodiments, the Cpf1, the nCpf1, or the dCpf1 comprises an amino acid sequence that is at least 85%, at least 90%, at least 91%, at least 92%, at least 93%, at least 94%, at least 95%, at least 96%, at least 97%, at least 98%, at least 99%, or at least 99.5% identical to a Cpf1 sequence disclosed herein. In some embodiments, the dCpf1 comprises an amino acid sequence that is at least 85%, at least 90%, at least 91%, at least 92%, at least 93%, at least 94%, at least 95%, at least 96%, at least 97%, at least 98%, at least 99%, or at ease 99.5% identical to a Cpf1 sequence disclosed herein, and comprises mutations corresponding to D917A, E1006A, D1255A, D917A/E1006A, D917A/D1255A, E1006A/D1255A, or D917A/E1006A/D1255A. It should be appreciated that Cpf1 from other bacterial species may also be used in accordance with the present disclosure.

[0209] The amino acid sequence of wild type Francisella novicida Cpf1 follows. D917, E1006, and D1255 are bolded and underlined.

MSIYQEFVNKYSLSKTLRFELIPQGKTLENIKARGLILDDEKRAKDYKKAK
QIIDKYHQFFIEEILSSVCISEDLLQNYSDVYFKLKKSDDDNLQKDFKSAK
DTIKKQISEYIKDSEKFKNLFNQNLIDAKKGQESDLILWLKQSKDNGIELF
KANSDITDIDEALEIIKSFKGWTTYFKGFHENRKNVYSSNDIPTSIIYRIV
DDNLPKFLENKAKYESLKDKAPEAINYEQIKKDLAEELTFDIDYKTSEVNQ
RVFSLDEVFEIANFNNYLNQSGITKFNTIIGGKFVNGENTKRKGINEYINL
YSQQINDKTLKKYKMSVLFKQILSDTESKSFVIDKLEDDSDVVTTMQSFYE
QIAAFKTVEEKSIKETLSLLFDDLKAQKLDLSKIYFKNDKSLTDLSQQVFD
DYSVIGTAVLEYITQQIAPKNLDNPSKKEQELIAKKTEKAKYLSLETIKLA
LEEFNKHRDIDKQCRFEEILANFAAIPMIFDEIAQNKDNLAQISIKYQNQG
KKDLLQASAEDDVKAIKDLLDQTNNLLHKLKIFHISQSEDKANILDKDEHF
YLVFEECYFELANIVPLYNKIRNYITQKPYSDEKFKLNFENSTLANGWDKN
KEPDNTAILFIKDDKYYLGVMNKKNNKIFDDKAIKENKGEGYKKIVYKLLP
GANKMLPKVFFSAKSIKFYNPSEDILRIRNHSTHTKNGSPQKGYEKFEFNI
EDCRKFIDFYKQSISKHPEWKDFGFRFSDTQRYNSIDEFYREVENQGYKLT
FENISESYIDSVVNQGKLYLFQIYNKDFSAYSKGRPNLHTLYWKALFDERN
LQDVVYKLNGEAELFYRKQSIPKKITHPAKEAIANKNKDNPKKESVFEYDL
IKDKRFTEDKFFFHCPITINFKSSGANKFNDEINLLLKEKANDVHILSIDR
GERHLAYYTLVDGKGNIIKQDTFNIIGNDRMKTNYHDKLAAIEKDRDSARK
DWKKINNIKEMKEGYLSQVVHEIAKLVIEYNAIVVFEDLNFGFKRGRFKVE
KQVYQKLEKMLIEKLNYLVFKDNEFDKTGGVLRAYQLTAPFETFKKMGKQT
GIIYYVPAGFTSKICPVTGFVNQLYPKYESVSKSQEFFSKFDKICYNLDKG
YFEFSFDYKNFGDKAAKGKWTIASFGSRLINFRNSDKNHNWDTREVYPTKE
LEKLLKDYSIEYGHGECIKAAICGESDKKFFAKLTSVLNTILQMRNSKTGT
ELDYLISPVADVNGNFFDSRQAPKNMPQDADANGAYHIGLKGLMLLGRIKN
NQEGKKLNLVIKNEEYFEFVQNRNN.

[0210] The amino acid sequence of Francisella novicida Cpf1 D917A follows. (A917, E1006, and D1255 are bolded and underlined).

MSIYQEFVNKYSLSKTLRFELIPQGKTLENIKARGLILDDEKRAKDYKKAK
QIIDKYHQFFIEEILSSVCISEDLLQNYSDVYFKLKKSDDDNLQKDFKSAK
DTIKKQISEYIKDSEKFKNLFNQNLIDAKKGQESDLILWLKQSKDNGIELF
KANSDITDIDEALEIIKSFKGWTTYFKGFHENRKNVYSSNDIPTSIIYRIV
DDNLPKFLENKAKYESLKDKAPEAINYEQIKKDLAEELTFDIDYKTSEVNQ
RVFSLDEVFEIANFNNYLNQSGITKFNTIIGGKFVNGENTKRKGINEYINL
YSQQINDKTLKKYKMSVLFKQILSDTESKSFVIDKLEDDSDVVTTMQSFYE
QIAAFKTVEEKSIKETLSLLFDDLKAQKLDLSKIYFKNDKSLTDLSQQVFD
DYSVIGTAVLEYITQQIAPKNLDNPSKKEQELIAKKTEKAKYLSLETIKLA
LEEFNKHRDIDKQCRFEEILANFAAIPMIFDEIAQNKDNLAQISIKYQNQG
KKDLLQASAEDDVKAIKDLLDQTNNLLHKLKIFHISQSEDKANILDKDEHF
YLVFEECYFELANIVPLYNKIRNYITQKPYSDEKFKLNFENSTLANGWDKN
KEPDNTAILFIKDDKYYLGVMNKKNNKIFDDKAIKENKGEGYKKIVYKLLP
GANKMLPKVFFSAKSIKFYNPSEDILRIRNHSTHTKNGSPQKGYEKFEFNI
EDCRKFIDFYKQSISKHPEWKDFGFRFSDTQRYNSIDEFYREVENQGYKLT
FENISESYIDSVVNQGKLYLFQIYNKDFSAYSKGRPNLHTLYWKALFDERN
LQDVVYKLNGEAELFYRKQSIPKKITHPAKEAIANKNKDNPKKESVFEYDL
IKDKRFTEDKFFFHCPITINFKSSGANKFNDEINLLLKEKANDVHILSIAR
GERHLAYYTLVDGKGNIIKQDTFNIIGNDRMKTNYHDKLAAIEKDRDSARK
DWKKINNIKEMKEGYLSQVVHEIAKLVIEYNAIVVFEDLNFGFKRGRFKVE
KQVYQKLEKMLIEKLNYLVFKDNEFDKTGGVLRAYQLTAPFETFKKMGKQT
GIIYYVPAGFTSKICPVTGFVNQLYPKYESVSKSQEFFSKFDKICYNLDKG
YFEFSFDYKNFGDKAAKGKWTIASFGSRLINFRNSDKNHNWDTREVYPTKE
LEKLLKDYSIEYGHGECIKAAICGESDKKFFAKLTSVLNTILQMRNSKTGT
ELDYLISPVADVNGNFFDSRQAPKNMPQDADANGAYHIGLKGLMLLGRIKN
NQEGKKLNLVIKNEEYFEFVQNRNN.

[0211] The amino acid sequence of Francisella novicida Cpf1 E1006A follows. (D917, A1006, and D1255 are bolded and underlined).

MSIYQEFVNKYSLSKTLRFELIPQGKTLENIKARGLILDDEKRAKDYKKAK
QIIDKYHQFFIEEILSSVCISEDLLQNYSDVYFKLKKSDDDNLQKDFKSAK
DTIKKQISEYIKDSEKFKNLFNQNLIDAKKGQESDLILWLKQSKDNGIELF
KANSDITDIDEALEIIKSFKGWTTYFKGFHENRKNVYSSNDIPTSIIYRIV
DDNLPKFLENKAKYESLKDKAPEAINYEQIKKDLAEELTFDIDYKTSEVNQ
RVFSLDEVFEIANFNNYLNQSGITKFNTIIGGKFVNGENTKRKGINEYINL
YSQQINDKTLKKYKMSVLFKQILSDTESKSFVIDKLEDDSDVVTTMQSFYE
QIAAFKTVEEKSIKETLSLLFDDLKAQKLDLSKIYFKNDKSLTDLSQQVFD
DYSVIGTAVLEYITQQIAPKNLDNPSKKEQELIAKKTEKAKYLSLETIKLA
LEEFNKHRDIDKQCRFEEILANFAAIPMIFDEIAQNKDNLAQISIKYQNQG
KKDLLQASAEDDVKAIKDLLDQTNNLLHKLKIFHISQSEDKANILDKDEHF
YLVFEECYFELANIVPLYNKIRNYITQKPYSDEKFKLNFENSTLANGWDKN
KEPDNTAILFIKDDKYYLGVMNKKNNKIFDDKAIKENKGEGYKKIVYKLLP
GANKMLPKVFFSAKSIKFYNPSEDILRIRNHSTHTKNGSPQKGYEKFEFNI
EDCRKFIDFYKQSISKHPEWKDFGFRFSDTQRYNSIDEFYREVENQGYKLT
FENISESYIDSVVNQGKLYLFQIYNKDFSAYSKGRPNLHTLYWKALFDERN
LQDVVYKLNGEAELFYRKQSIPKKITHPAKEAIANKNKDNPKKESVFEYDL
IKDKRFTEDKFFFHCPITINFKSSGANKFNDEINLLLKEKANDVHILSIDR
GERHLAYYTLVDGKGNIIKQDTFNIIGNDRMKTNYHDKLAAIEKDRDSARK
DWKKINNIKEMKEGYLSQVVHEIAKLVIEYNAIVVFADLNFGFKRGRFKVE
KQVYQKLEKMLIEKLNYLVFKDNEFDKTGGVLRAYQLTAPFETFKKMGKQT
GIIYYVPAGFTSKICPVTGFVNQLYPKYESVSKSQEFFSKFDKICYNLDKG
YFEFSFDYKNFGDKAAKGKWTIASFGSRLINFRNSDKNHNWDTREVYPTKE
LEKLLKDYSIEYGHGECIKAAICGESDKKFFAKLTSVLNTILQMRNSKTGT
ELDYLISPVADVNGNFFDSRQAPKNMPQDADANGAYHIGLKGLMLLGRIKN
NQEGKKLNLVIKNEEYFEFVQNRNN.

[0212] The amino acid sequence of Francisella novicida Cpf1 D1255A follows. (D917, E1006, and A1255 mutation positions are bolded and underlined).

MSIYQEFVNKYSLSKTLRFELIPQGKTLENIKARGLILDDEKRAKDYKKAK
QIIDKYHQFFIEEILSSVCISEDLLQNYSDVYFKLKKSDDDNLQKDFKSAK
DTIKKQISEYIKDSEKFKNLFNQNLIDAKKGQESDLILWLKQSKDNGIELF
KANSDITDIDEALEIIKSFKGWTTYFKGFHENRKNVYSSNDIPTSIIYRIV
DDNLPKFLENKAKYESLKDKAPEAINYEQIKKDLAEELTFDIDYKTSEVNQ
RVFSLDEVFEIANFNNYLNQSGITKFNTIIGGKFVNGENTKRKGINEYINL
YSQQINDKTLKKYKMSVLFKQILSDTESKSFVIDKLEDDSDVVTTMQSFYE
QIAAFKTVEEKSIKETLSLLFDDLKAQKLDLSKIYFKNDKSLTDLSQQVFD
DYSVIGTAVLEYITQQIAPKNLDNPSKKEQELIAKKTEKAKYLSLETIKLA
LEEFNKHRDIDKQCRFEEILANFAAIPMIFDEIAQNKDNLAQISIKYQNQG
KKDLLQASAEDDVKAIKDLLDQTNNLLHKLKIFHISQSEDKANILDKDEHF
YLVFEECYFELANIVPLYNKIRNYITQKPYSDEKFKLNFENSTLANGWDKN
KEPDNTAILFIKDDKYYLGVMNKKNNKIFDDKAIKENKGEGYKKIVYKLLP
GANKMLPKVFFSAKSIKFYNPSEDILRIRNHSTHTKNGSPQKGYEKFEFNI
EDCRKFIDFYKQSISKHPEWKDFGFRFSDTQRYNSIDEFYREVENQGYKLT
FENISESYIDSVVNQGKLYLFQIYNKDFSAYSKGRPNLHTLYWKALFDERN
LQDVVYKLNGEAELFYRKQSIPKKITHPAKEAIANKNKDNPKKESVFEYDL
IKDKRFTEDKFFFHCPITINFKSSGANKFNDEINLLLKEKANDVHILSIDR
GERHLAYYTLVDGKGNIIKQDTFNIIGNDRMKTNYHDKLAAIEKDRDSARK
DWKKINNIKEMKEGYLSQVVHEIAKLVIEYNAIVVFEDLNFGFKRGRFKVE
KQVYQKLEKMLIEKLNYLVFKDNEFDKTGGVLRAYQLTAPFETFKKMGKQT
GIIYYVPAGFTSKICPVTGFVNQLYPKYESVSKSQEFFSKFDKICYNLDKG
YFEFSFDYKNFGDKAAKGKWTIASFGSRLINFRNSDKNHNWDTREVYPTKE
LEKLLKDYSIEYGHGECIKAAICGESDKKFFAKLTSVLNTILQMRNSKTGT
ELDYLISPVADVNGNFFDSRQAPKNMPQDAAANGAYHIGLKGLMLLGRIKN
NQEGKKLNLVIKNEEYFEFVQNRNN

[0213] The amino acid sequence of Francisella novicida Cpf1 D917A/E1006A follows. (A917, A1006, and D1255 are bolded and underlined).

MSIYQEFVNKYSLSKTLRFELIPQGKTLENIKARGLILDDEKRAKDYKKAK
QIIDKYHQFFIEEILSSVCISEDLLQNYSDVYFKLKKSDDDNLQKDFKSAK
DTIKKQISEYIKDSEKFKNLFNQNLIDAKKGQESDLILWLKQSKDNGIELF
KANSDITDIDEALEIIKSFKGWTTYFKGFHENRKNVYSSNDIPTSIIYRIV
DDNLPKFLENKAKYESLKDKAPEAINYEQIKKDLAEELTFDIDYKTSEVNQ
RVFSLDEVFEIANFNNYLNQSGITKFNTIIGGKFVNGENTKRKGINEYINL
YSQQINDKTLKKYKMSVLFKQILSDTESKSFVIDKLEDDSDVVTTMQSFYE
QIAAFKTVEEKSIKETLSLLFDDLKAQKLDLSKIYFKNDKSLTDLSQQVFD
DYSVIGTAVLEYITQQIAPKNLDNPSKKEQELIAKKTEKAKYLSLETIKLA
LEEFNKHRDIDKQCRFEEILANFAAIPMIFDEIAQNKDNLAQISIKYQNQG
KKDLLQASAEDDVKAIKDLLDQTNNLLHKLKIFHISQSEDKANILDKDEHF
YLVFEECYFELANIVPLYNKIRNYITQKPYSDEKFKLNFENSTLANGWDKN
KEPDNTAILFIKDDKYYLGVMNKKNNKIFDDKAIKENKGEGYKKIVYKLLP
GANKMLPKVFFSAKSIKFYNPSEDILRIRNHSTHTKNGSPQKGYEKFEFNI
EDCRKFIDFYKQSISKHPEWKDFGFRFSDTQRYNSIDEFYREVENQGYKLT
FENISESYIDSVVNQGKLYLFQIYNKDFSAYSKGRPNLHTLYWKALFDERN
LQDVVYKLNGEAELFYRKQSIPKKITHPAKEAIANKNKDNPKKESVFEYDL
IKDKRFTEDKFFFHCPITINFKSSGANKFNDEINLLLKEKANDVHILSIAR
GERHLAYYTLVDGKGNIIKQDTFNIIGNDRMKTNYHDKLAAIEKDRDSARK
DWKKINNIKEMKEGYLSQVVHEIAKLVIEYNAIVVFADLNFGFKRGRFKVE
KQVYQKLEKMLIEKLNYLVFKDNEFDKTGGVLRAYQLTAPFETFKKMGKQT
GIIYYVPAGFTSKICPVTGFVNQLYPKYESVSKSQEFFSKFDKICYNLDKG
YFEFSFDYKNFGDKAAKGKWTIASFGSRLINFRNSDKNHNWDTREVYPTKE
LEKLLKDYSIEYGHGECIKAAICGESDKKFFAKLTSVLNTILQMRNSKTGT
ELDYLISPVADVNGNFFDSRQAPKNMPQDADANGAYHIGLKGLMLLGRIKN
NQEGKKLNLVIKNEEYFEFVQNRNN.

[0214] The amino acid sequence of Francisella novicida Cpf1 D917A/D1255A follows. (A917, E1006, and A1255 are bolded and underlined).

MSIYQEFVNKYSLSKTLRFELIPQGKTLENIKARGLILDDEKRAKDYKKAK
QIIDKYHQFFIEEILSSVCISEDLLQNYSDVYFKLKKSDDDNLQKDFKSAK
DTIKKQISEYIKDSEKFKNLFNQNLIDAKKGQESDLILWLKQSKDNGIELF
KANSDITDIDEALEIIKSFKGWTTYFKGFHENRKNVYSSNDIPTSIIYRIV
DDNLPKFLENKAKYESLKDKAPEAINYEQIKKDLAEELTFDIDYKTSEVNQ
RVFSLDEVFEIANFNNYLNQSGITKFNTIIGGKFVNGENTKRKGINEYINL
YSQQINDKTLKKYKMSVLFKQILSDTESKSFVIDKLEDDSDVVTTMQSFYE
QIAAFKTVEEKSIKETLSLLFDDLKAQKLDLSKIYFKNDKSLTDLSQQVFD
DYSVIGTAVLEYITQQIAPKNLDNPSKKEQELIAKKTEKAKYLSLETIKLA
LEEFNKHRDIDKQCRFEEILANFAAIPMIFDEIAQNKDNLAQISIKYQNQG
KKDLLQASAEDDVKAIKDLLDQTNNLLHKLKIFHISQSEDKANILDKDEHF
YLVFEECYFELANIVPLYNKIRNYITQKPYSDEKFKLNFENSTLANGWDKN
KEPDNTAILFIKDDKYYLGVMNKKNNKIFDDKAIKENKGEGYKKIVYKLLP
GANKMLPKVFFSAKSIKFYNPSEDILRIRNHSTHTKNGSPQKGYEKFEFNI
EDCRKFIDFYKQSISKHPEWKDFGFRFSDTQRYNSIDEFYREVENQGYKLT
FENISESYIDSVVNQGKLYLFQIYNKDFSAYSKGRPNLHTLYWKALFDERN
LQDVVYKLNGEAELFYRKQSIPKKITHPAKEAIANKNKDNPKKESVFEYDL
IKDKRFTEDKFFFHCPITINFKSSGANKFNDEINLLLKEKANDVHILSIAR
GERHLAYYTLVDGKGNIIKQDTFNIIGNDRMKTNYHDKLAAIEKDRDSARK
DWKKINNIKEMKEGYLSQVVHEIAKLVIEYNAIVVFEDLNFGFKRGRFKVE
KQVYQKLEKMLIEKLNYLVFKDNEFDKTGGVLRAYQLTAPFETFKKMGKQT
GIIYYVPAGFTSKICPVTGFVNQLYPKYESVSKSQEFFSKFDKICYNLDKG
YFEFSFDYKNFGDKAAKGKWTIASFGSRLINFRNSDKNHNWDTREVYPTKE
LEKLLKDYSIEYGHGECIKAAICGESDKKFFAKLTSVLNTILQMRNSKTGT
ELDYLISPVADVNGNFFDSRQAPKNMPQDAAANGAYHIGLKGLMLLGRIKN
NQEGKKLNLVIKNEEYFEFVQNRNN.

[0215] The amino acid sequence of Francisella novicida Cpf1 E1006A/D1255A follows. (D917, A1006, and A1255 are bolded and underlined).

MSIYQEFVNKYSLSKTLRFELIPQGKTLENIKARGLILDDEKRAKDYKKAK
QIIDKYHQFFIEEILSSVCISEDLLQNYSDVYFKLKKSDDDNLQKDFKSAK
DTIKKQISEYIKDSEKFKNLFNQNLIDAKKGQESDLILWLKQSKDNGIELF
KANSDITDIDEALEIIKSFKGWTTYFKGFHENRKNVYSSNDIPTSIIYRIV
DDNLPKFLENKAKYESLKDKAPEAINYEQIKKDLAEELTFDIDYKTSEVNQ
RVFSLDEVFEIANFNNYLNQSGITKFNTIIGGKFVNGENTKRKGINEYINL
YSQQINDKTLKKYKMSVLFKQILSDTESKSFVIDKLEDDSDVVTTMQSFYE
QIAAFKTVEEKSIKETLSLLFDDLKAQKLDLSKIYFKNDKSLTDLSQQVFD
DYSVIGTAVLEYITQQIAPKNLDNPSKKEQELIAKKTEKAKYLSLETIKLA
LEEFNKHRDIDKQCRFEEILANFAAIPMIFDEIAQNKDNLAQISIKYQNQG
KKDLLQASAEDDVKAIKDLLDQTNNLLHKLKIFHISQSEDKANILDKDEHF
YLVFEECYFELANIVPLYNKIRNYITQKPYSDEKFKLNFENSTLANGWDKN
KEPDNTAILFIKDDKYYLGVMNKKNNKIFDDKAIKENKGEGYKKIVYKLLP
GANKMLPKVFFSAKSIKFYNPSEDILRIRNHSTHTKNGSPQKGYEKFEFNI
EDCRKFIDFYKQSISKHPEWKDFGFRFSDTQRYNSIDEFYREVENQGYKLT
FENISESYIDSVVNQGKLYLFQIYNKDFSAYSKGRPNLHTLYWKALFDERN
LQDVVYKLNGEAELFYRKQSIPKKITHPAKEAIANKNKDNPKKESVFEYDL
IKDKRFTEDKFFFHCPITINFKSSGANKFNDEINLLLKEKANDVHILSIDR
GERHLAYYTLVDGKGNIIKQDTFNIIGNDRMKTNYHDKLAAIEKDRDSARK
DWKKINNIKEMKEGYLSQVVHEIAKLVIEYNAIVVFADLNFGFKRGRFKVE
KQVYQKLEKMLIEKLNYLVFKDNEFDKTGGVLRAYQLTAPFETFKKMGKQT
GIIYYVPAGFTSKICPVTGFVNQLYPKYESVSKSQEFFSKFDKICYNLDKG
YFEFSFDYKNFGDKAAKGKWTIASFGSRLINFRNSDKNHNWDTREVYPTKE
LEKLLKDYSIEYGHGECIKAAICGESDKKFFAKLTSVLNTILQMRNSKTGT
ELDYLISPVADVNGNFFDSRQAPKNMPQDAAANGAYHIGLKGLMLLGRIKN
NQEGKKLNLVIKNEEYFEFVQNRNN.

[0216] The amino acid sequence of Francisella novicida Cpf1 D917A/E1006A/D1255A follows. (A917, A1006, and A1255 are bolded and underlined).

MSIYQEFVNKYSLSKTLRFELIPQGKTLENIKARGLILDDEKRAKDYKKAK
QIIDKYHQFFIEEILSSVCISEDLLQNYSDVYFKLKKSDDDNLQKDFKSAK
DTIKKQISEYIKDSEKFKNLFNQNLIDAKKGQESDLILWLKQSKDNGIELF
KANSDITDIDEALEIIKSFKGWTTYFKGFHENRKNVYSSNDIPTSIIYRIV
DDNLPKFLENKAKYESLKDKAPEAINYEQIKKDLAEELTFDIDYKTSEVNQ
RVFSLDEVFEIANFNNYLNQSGITKFNTIIGGKFVNGENTKRKGINEYINL
YSQQINDKTLKKYKMSVLFKQILSDTESKSFVIDKLEDDSDVVTTMQSFYE
QIAAFKTVEEKSIKETLSLLFDDLKAQKLDLSKIYFKNDKSLTDLSQQVFD
DYSVIGTAVLEYITQQIAPKNLDNPSKKEQELIAKKTEKAKYLSLETIKLA
LEEFNKHRDIDKQCRFEEILANFAAIPMIFDEIAQNKDNLAQISIKYQNQG
KKDLLQASAEDDVKAIKDLLDQTNNLLHKLKIFHISQSEDKANILDKDEHF
YLVFEECYFELANIVPLYNKIRNYITQKPYSDEKFKLNFENSTLANGWDKN
KEPDNTAILFIKDDKYYLGVMNKKNNKIFDDKAIKENKGEGYKKIVYKLLP
GANKMLPKVFFSAKSIKFYNPSEDILRIRNHSTHTKNGSPQKGYEKFEFNI
EDCRKFIDFYKQSISKHPEWKDFGFRFSDTQRYNSIDEFYREVENQGYKLT
FENISESYIDSVVNQGKLYLFQIYNKDFSAYSKGRPNLHTLYWKALFDERN
LQDVVYKLNGEAELFYRKQSIPKKITHPAKEAIANKNKDNPKKESVFEYDL
IKDKRFTEDKFFFHCPITINFKSSGANKFNDEINLLLKEKANDVHILSIAR
GERHLAYYTLVDGKGNIIKQDTFNIIGNDRMKTNYHDKLAAIEKDRDSARK
DWKKINNIKEMKEGYLSQVVHEIAKLVIEYNAIVVFADLNFGFKRGRFKVE
KQVYQKLEKMLIEKLNYLVFKDNEFDKTGGVLRAYQLTAPFETFKKMGKQT
GIIYYVPAGFTSKICPVTGFVNQLYPKYESVSKSQEFFSKFDKICYNLDKG
YFEFSFDYKNFGDKAAKGKWTIASFGSRLINFRNSDKNHNWDTREVYPTKE
LEKLLKDYSIEYGHGECIKAAICGESDKKFFAKLTSVLNTILQMRNSKTGT
ELDYLISPVADVNGNFFDSRQAPKNMPQDAAANGAYHIGLKGLMLLGRIKN
NQEGKKLNLVIKNEEYFEFVQNRNN.

[0217] In some embodiments, one of the Cas9 domains present in the fusion protein may be replaced with a guide nucleotide sequence-programmable DNA-binding protein domain that has no requirements for a PAM sequence.

[0218] In some embodiments, the Cas domain is a Cas9 domain from Staphylococcus aureus (SaCas9). In some embodiments, the SaCas9 domain is a nuclease active SaCas9, a nuclease inactive SaCas9 (SaCas9d), or a SaCas9 nickase (SaCas9n). In some embodiments, the SaCas9 domain comprises a N579A mutation, or a corresponding mutation in any of the amino acid sequences provided herein.

[0219] In some embodiments, the SaCas9 domain, the SaCas9d domain, or the SaCas9n domain can bind to a nucleic acid sequence having a non-canonical PAM. In some embodiments, the SaCas9 domain, the SaCas9d domain, or the SaCas9n domain can bind to a nucleic acid sequence having a NNGRRT or a NNGRRT PAM sequence. In some embodiments, the SaCas9 domain comprises one or more of a E781X, a N967X, and a R1014X mutation, or a corresponding mutation in any of the amino acid sequences provided herein, wherein X is any amino acid. In some embodiments, the SaCas9 domain comprises one or more of a E781K, a N967K, and a R1014H mutation, or one or more corresponding mutation in any of the amino acid sequences provided herein. In some embodiments, the SaCas9 domain comprises a E781K, a N967K, or a R1014H mutation, or corresponding mutations in any of the amino acid sequences provided herein.

[0220] The amino acid sequence of an exemplary SaCas9 is as follows:

MKRNYILGLDIGITSVGYGIIDYETRDVIDAGVRLFKEANVENNEGRRSKR
GARRLKRRRRHRIQRVKKLLFDYNLLTDHSELSGINPYEARVKGLSQKLSE
EEFSAALLHLAKRRGVHNVNEVEEDTGNELSTKEQISRNSKALEEKYVAEL
QLERLKKDGEVRGSINRFKTSDYVKEAKQLLKVQKAYHQLDQSFIDTYIDL
LETRRTYYEGPGEGSPFGWKDIKEWYEMLMGHCTYFPEELRSVKYAYNADL
YNALNDLNNLVITRDENEKLEYYEKFQIIENVFKQKKKPTLKQIAKEILVN
EEDIKGYRVTSTGKPEFTNLKVYHDIKDITARKEIIENAELLDQIAKILTI
YQSSEDIQEELTNLNSELTQEEIEQISNLKGYTGTHNLSLKAINLILDELW
HTNDNQIAIFNRLKLVPKKVDLSQQKEIPTTLVDDFILSPVVKRSFIQSIK
VINAIIKKYGLPNDIIIELAREKNSKDAQKMINEMQKRNRQTNERIEEIIR
TTGKENAKYLIEKIKLHDMQEGKCLYSLEAIPLEDLLNNPFNYEVDHIIPR
SVSFDNSFNNKVLVKQEENSKKGNRTPFQYLSSSDSKISYETFKKHILNLA
KGKGRISKTKKEYLLEERDINRFSVQKDFINRNLVDTRYATRGLMNLLRSY
FRVNNLDVKVKSINGGFTSFLRRKWKFKKERNKGYKHHAEDALIIANADFI
FKEWKKLDKAKKVMENQMFEEKQAESMPEIETEQEYKEIFITPHQIKHIKD
FKDYKYSHRVDKKPNRELINDTLYSTRKDDKGNTLIVNNLNGLYDKDNDKL
KKLINKSPEKLLMYHHDPQTYQKLKLIMEQYGDEKNPLYKYYEETGNYLTK
YSKKDNGPVIKKIKYYGNKLNAHLDITDDYPNSRNKVVKLSLKPYRFDVYL
DNGVYKFVTVKNLDVIKKENYYEVNSKCYEEAKKLKKISNQAEFIASFYNN
DLIKINGELYRVIGVNNDLLNRIEVNMIDITYREYLENMNDKRPPRIIKTI
ASKTQSIKKYSTDILGNLYEVKSKKHPQIIKKG.

In this sequence, residue N579, which is underlined and in bold, may be mutated (e.g., to a A579) to yield a SaCas9 nickase.

[0221] The amino acid sequence of an exemplary SaCas9n is as follows:

KRNYILGLDIGITSVGYGIIDYETRDVIDAGVRLFKEANVENNEGRRSKRG
ARRLKRRRRHRIQRVKKLLFDYNLLTDHSELSGINPYEARVKGLSQKLSEE
EFSAALLHLAKRRGVHNVNEVEEDTGNELSTKEQISRNSKALEEKYVAELQ
LERLKKDGEVRGSINRFKTSDYVKEAKQLLKVQKAYHQLDQSFIDTYIDLL
ETRRTYYEGPGEGSPFGWKDIKEWYEMLMGHCTYFPEELRSVKYAYNADLY
NALNDLNNLVITRDENEKLEYYEKFQIIENVFKQKKKPTLKQIAKEILVNE
EDIKGYRVTSTGKPEFTNLKVYHDIKDITARKEIIENAELLDQIAKILTIY
QSSEDIQEELTNLNSELTQEEIEQISNLKGYTGTHNLSLKAINLILDELWH
TNDNQIAIFNRLKLVPKKVDLSQQKEIPTTLVDDFILSPVVKRSFIQSIKV
INAIIKKYGLPNDIIIELAREKNSKDAQKMINEMQKRNRQTNERIEEIIRT
TGKENAKYLIEKIKLHDMQEGKCLYSLEAIPLEDLLNNPFNYEVDHIIPRS
VSFDNSFNNKVLVKQEEASKKGNRTPFQYLSSSDSKISYETFKKHILNLAK
GKGRISKIKKEYLLEERDINRFSVQKDFINRNLVDTRYATRGLMNLLRSYF
RVNNLDVKVKSINGGFTSFLRRKWKFKKERNKGYKHHAEDALIIANADFIF
KEWKKLDKAKKVMENQMFEEKQAESMPEIETEQEYKEIFITPHQIKHIKDF
KDYKYSHRVDKKPNRELINDTLYSTRKDDKGNTLIVNNLNGLYDKDNDKLK
KLINKSPEKLLMYHHDPQTYQKLKLIMEQYGDEKNPLYKYYEETGNYLTKY
SKKDNGPVIKKIKYYGNKLNAHLDITDDYPNSRNKVVKLSLKPYRFDVYLD
NGVYKFVTVKNLDVIKKENYYEVNSKCYEEAKKLKKISNQAEFIASFYNND
LIKINGELYRVIGVNNDLLNRIEVNMIDITYREYLENMNDKRPPRIIKTIA
SKTQSIKKYSTDILGNLYEVKSKKHPQIIKKG.

[0222] In this sequence, residue A579, which can be mutated from N579 to yield a SaCas9 nickase, is underlined and in bold.

[0223] The amino acid sequences of an exemplary SaKKH Cas9 is as follows:

KRNYILGLDIGITSVGYGIIDYETRDVIDAGVRLFKEANVENNEGRRSKRG
ARRLKRRRRHRIQRVKKLLFDYNLLTDHSELSGINPYEARVKGLSQKLSEE
EFSAALLHLAKRRGVHNVNEVEEDTGNELSTKEQISRNSKALEEKYVAELQ
LERLKKDGEVRGSINRFKTSDYVKEAKQLLKVQKAYHQLDQSFIDTYIDLL
ETRRTYYEGPGEGSPFGWKDIKEWYEMLMGHCTYFPEELRSVKYAYNADLY
NALNDLNNLVITRDENEKLEYYEKFQIIENVFKQKKKPTLKQIAKEILVNE
EDIKGYRVTSTGKPEFTNLKVYHDIKDITARKEIIENAELLDQIAKILTIY
QSSEDIQEELTNLNSELTQEEIEQISNLKGYTGTHNLSLKAINLILDELWH
TNDNQIAIFNRLKLVPKKVDLSQQKEIPTTLVDDFILSPVVKRSFIQSIKV
INAIIKKYGLPNDIIIELAREKNSKDAQKMINEMQKRNRQTNERIEEIIRT
TGKENAKYLIEKIKLHDMQEGKCLYSLEAIPLEDLLNNPFNYEVDHIIPRS
VSFDNSFNNKVLVKQEEASKKGNRTPFQYLSSSDSKISYETFKKHILNLAK
GKGRISKTKKEYLLEERDINRFSVQKDFINRNLVDTRYATRGLMNLLRSYF
RVNNLDVKVKSINGGFTSFLRRKWKFKKERNKGYKHHAEDALIIANADFIF
KEWKKLDKAKKVMENQMFEEKQAESMPEIETEQEYKEIFITPHQIKHIKDF
KDYKYSHRVDKKPNRKLINDTLYSTRKDDKGNTLIVNNLNGLYDKDNDKLK
KLINKSPEKLLMYHHDPQTYQKLKLIMEQYGDEKNPLYKYYEETGNYLTKY
SKKDNGPVIKKIKYYGNKLNAHLDITDDYPNSRNKVVKLSLKPYRFDVYLD
NGVYKFVTVKNLDVIKKENYYEVNSKCYEEAKKLKKISNQAEFIASFYKND
LIKINGELYRVIGVNNDLLNRIEVNMIDITYREYLENMNDKRPPHIIKTIA
SKTQSIKKYSTDILGNLYEVKSKKHPQIIKKG.

[0224] Residue A579 above, which can be mutated from N579 to yield a SaCas9 nickase, is underlined and in bold. Residues K781, K967, and H1014 above, which can be mutated from E781, N967, and R1014 to yield a SaKKH Cas9 are underlined and in italics.

### High Fidelity Cas9 Domains

[0225] Some aspects of the disclosure provide high fidelity Cas9 domains. In some embodiments, high fidelity Cas9 domains are engineered Cas9 domains comprising one or more mutations that decrease electrostatic interactions between the Cas9 domain and the sugar-phosphate backbone of a DNA, relative to a corresponding wild-type Cas9 domain. High fidelity Cas9 domains that have decreased electrostatic interactions with the sugar-phosphate backbone of DNA can have less off-target effects. In some embodiments, the Cas9 domain (e.g., a wild type Cas9 domain) comprises one or more mutations that decrease the association between the Cas9 domain and the sugar-phosphate backbone of a DNA. In some embodiments, a Cas9 domain comprises one or more mutations that decreases the association between the Cas9 domain and the sugar-phosphate backbone of DNA by at least 1%, at least 2%, at least 3%, at least 4%, at least 5%, at least 10%, at least 15%, at least 20%, at least 25%, at least 30%, at least 35%, at least 40%, at least 45%, at least 50%, at least 55%, at least 60%, at least 65%, or at least 70%.

[0226] In some embodiments, any of the Cas9 fusion proteins provided herein comprise one or more of a N497X, a R661X, a Q695X, and/or a Q926X mutation, or a corresponding mutation in any of the amino acid sequences provided herein, wherein X is any amino acid. In some embodiments, any of the Cas9 fusion proteins provided herein comprise one or more of a N497A, a R661A, a Q695A, and/or a Q926A mutation, or a corresponding mutation in any of the amino acid sequences provided herein. In some embodiments, the Cas9 domain comprises a D10A mutation, or a corresponding mutation in any of the amino acid sequences provided herein. Cas9 domains with high fidelity are known in the art and would be apparent to the skilled artisan. For example, Cas9 domains with high fidelity have been described in Kleinstiver, B. P., et al. “High-fidelity CRISPR-Cas9 nucleases with no detectable genome-wide off-target effects.” Nature 529, 490-495 (2016); and Slaymaker, I. M., et al. “Rationally engineered Cas9 nucleases with improved specificity.” Science 351, 84-88 (2015); the entire contents of each are incorporated herein by reference.

[0227] In some embodiments, the modified Cas9 is a high fidelity Cas9 enzyme. In some embodiments, the high fidelity Cas9 enzyme is SpCas9(K855A), eSpCas9(1.1), SpCas9-HF1, or hyper accurate Cas9 variant (HypaCas9). The modified Cas9 eSpCas9(1.1) contains alanine substitutions that weaken the interactions between the HNH/RuvC groove and the non-target DNA strand, preventing strand separation and cutting at off-target sites. Similarly, SpCas9-HF1 lowers off-target editing through alanine substitutions that disrupt Cas9's interactions with the DNA phosphate backbone. HypaCas9 contains mutations (SpCas9 N692A/M694A/Q695A/H698A) in the REC3 domain that increase Cas9 proofreading and target discrimination. All three high fidelity enzymes generate less off-target editing than wildtype Cas9.

[0228] An exemplary high fidelity Cas9 is provided below.

High Fidelity Cas9 domain mutations relative to Cas9 are shown in bold and underline

MDKKYSIGLAIGTNSVGWAVITDEYKVPSKKFKVLGNTDRHSIKKNLIGAL
LFDSGETAEATRLKRTARRRYTRRKNRICYLQEIFSNEMAKVDDSFFHRLE
ESFLVEEDKKHERHPIFGNIVDEVAYHEKYPTIYHLRKKLVDSTDKADLRL
IYLALAHMIKFRGHFLIEGDLNPDNSDVDKLFIQLVQTYNQLFEENPINAS
GVDAKAILSARLSKSRRLENLIAQLPGEKKNGLFGNLIALSLGLTPNFKSN
FDLAEDAKLQLSKDTYDDDLDNLLAQIGDQYADLFLAAKNLSDAILLSDIL
RVNTEITKAPLSASMIKRYDEHHQDLTLLKALVRQQLPEKYKEIFFDQSKN
GYAGYIDGGASQEEFYKFIKPILEKMDGTEELLVKLNREDLLRKQRTFDNG
SIPHQIHLGELHAILRRQEDFYPFLKDNREKIEKILTFRIPYYVGPLARGN
SRFAWMTRKSEETITPWNFEEVVDKGASAQSFIERMTAFDKNLPNEKVLPK
HSLLYEYFTVYNELTKVKYVTEGMRKPAFLSGEQKKAIVDLLFKTNRKVTV
KQLKEDYFKKIECFDSVEISGVEDRFNASLGTYHDLLKIIKDKDFLDNEEN
EDILEDIVLTLTLFEDREMIEERLKTYAHLFDDKVMKQLKRRRYTGWGALS
RKLINGIRDKQSGKTILDFLKSDGFANRNFMALIHDDSLTFKEDIQKAQVS
GQGDSLHEHIANLAGSPAIKKGILQTVKVVDELVKVMGRHKPENIVIEMAR
ENQTTQKGQKNSRERMKRIEEGIKELGSQILKEHPVENTQLQNEKLYLYYL
QNGRDMYVDQELDINRLSDYDVDHIVPQSFLKDDSIDNKVLTRSDKNRGKS
DNVPSEEVVKKMKNYWRQLLNAKLITQRKFDNLTKAERGGLSELDKAGFIK
RQLVETRAITKHVAQILDSRMNTKYDENDKLIREVKVITLKSKLVSDFRKD
FQFYKVREINNYHHAHDAYLNAVVGTALIKKYPKLESEFVYGDYKVYDVRK
MIAKSEQEIGKATAKYFFYSNIMNFFKTEITLANGEIRKRPLIETNGETGE
IVWDKGRDFATVRKVLSMPQVNIVKKTEVQTGGFSKESILPKRNSDKLIAR
KKDWDPKKYGGFDSPTVAYSVLVVAKVEKGKSKKLKSVKELLGITIMERSS
FEKNPIDFLEAKGYKEVKKDLIIKLPKYSLFELENGRKRMLASAGELQKGN
ELALPSKYVNFLYLASHYEKLKGSPEDNEQKQLFVEQHKHYLDEIIEQISE
FSKRVILADANLDKVLSAYNKHRDKPIREQAENIIHLFTLTNLGAPAAFKY
FDTTIDRKRYTSTKEVLDATLIHQSITGLYETRIDLSQLGGD

### Guide Polynucleotides

[0229] In an embodiment, the guide polynucleotide is a guide RNA. An RNA/Cas complex can assist in “guiding” Cas protein to a target DNA. Cas9/crRNA/tracrRNA endonucleolytically cleaves linear or circular dsDNA target complementary to the spacer. The target strand not complementary to crRNA is first cut endonucleolytically, then trimmed 3′-5′ exonucleolytically. In nature, DNA-binding and cleavage typically requires protein and both RNAs. However, single guide RNAs (“sgRNA”, or simply “gNRA”) can be engineered so as to incorporate aspects of both the crRNA and tracrRNA into a single RNA species. See, e.g., Jinek M. et al., Science 337:816-821(2012), the entire contents of which is hereby incorporated by reference. Cas9 recognizes a short motif in the CRISPR repeat sequences (the PAM or protospacer adjacent motif) to help distinguish self versus non-self. Cas9 nuclease sequences and structures are well known to those of skill in the art (see e.g., “Complete genome sequence of an M1 strain of Streptococcus pyogenes.” Ferretti, J. J. et al., Natl. Acad. Sci. U.S.A. 98:4658-4663(2001); “CRISPR RNA maturation by trans-encoded small RNA and host factor RNase III.” Deltcheva E. et al., Nature 471:602-607(2011); and “Programmable dual-RNA-guided DNA endonuclease in adaptive bacterial immunity.” Jinek M. et al, Science 337:816-821(2012), the entire contents of each of which are incorporated herein by reference). Cas9 orthologs have been described in various species, including, but not limited to, S. pyogenes and S. thermophilus. Additional suitable Cas9 nucleases and sequences can be apparent to those of skill in the art based on this disclosure, and such Cas9 nucleases and sequences include Cas9 sequences from the organisms and loci disclosed in Chylinski, Rhun, and Charpentier, “The tracrRNA and Cas9 families of type II CRISPR-Cas immunity systems” (2013) RNA Biology 10:5, 726-737; the entire contents of which are incorporated herein by reference. In some embodiments, a Cas9 nuclease has an inactive (e.g., an inactivated) DNA cleavage domain, that is, the Cas9 is a nickase.

[0230] In some embodiments, the guide polynucleotide is at least one single guide RNA (“sgRNA” or “gNRA”). In some embodiments, the guide polynucleotide is at least one tracrRNA. In some embodiments, the guide polynucleotide does not require PAM sequence to guide the polynucleotide-programmable DNA-binding domain (e.g., Cas9 or Cpf1) to the target nucleotide sequence.

[0231] The polynucleotide programmable nucleotide binding domain (e.g., a CRISPR-derived domain) of the base editors disclosed herein can recognize a target polynucleotide sequence by associating with a guide polynucleotide. A guide polynucleotide (e.g., gRNA) is typically single-stranded and can be programmed to site-specifically bind (i.e., via complementary base pairing) to a target sequence of a polynucleotide, thereby directing a base editor that is in conjunction with the guide nucleic acid to the target sequence. A guide polynucleotide can be DNA. A guide polynucleotide can be RNA. In some cases, the guide polynucleotide comprises natural nucleotides (e.g., adenosine). In some cases, the guide polynucleotide comprises non-natural (or unnatural) nucleotides (e.g., peptide nucleic acid or nucleotide analogs). In some cases, the targeting region of a guide nucleic acid sequence can be at least 15, 16, 17, 18, 19, 20, 21, 22, 23, 24, 25, 26, 27, 28, 29, or 30 nucleotides in length. A targeting region of a guide nucleic acid can be between 10-30 nucleotides in length, or between 15-25 nucleotides in length, or between 15-20 nucleotides in length.

[0232] In some embodiments, a guide polynucleotide comprises two or more individual polynucleotides, which can interact with one another via for example complementary base pairing (e.g., a dual guide polynucleotide). For example, a guide polynucleotide can comprise a CRISPR RNA (crRNA) and a trans-activating CRISPR RNA (tracrRNA). For example, a guide polynucleotide can comprise one or more trans-activating CRISPR RNA (tracrRNA).

[0233] In type II CRISPR systems, targeting of a nucleic acid by a CRISPR protein (e.g., Cas9) typically requires complementary base pairing between a first RNA molecule (crRNA) comprising a sequence that recognizes the target sequence and a second RNA molecule (trRNA) comprising repeat sequences which forms a scaffold region that stabilizes the guide RNA-CRISPR protein complex. Such dual guide RNA systems can be employed as a guide polynucleotide to direct the base editors disclosed herein to a target polynucleotide sequence.

[0234] In some embodiments, the base editor provided herein utilizes a single guide polynucleotide (e.g., gRNA). In some embodiments, the base editor provided herein utilizes a dual guide polynucleotide (e.g., dual gRNAs). In some embodiments, the base editor provided herein utilizes one or more guide polynucleotide (e.g., multiple gRNA). In some embodiments, a single guide polynucleotide is utilized for different base editors described herein. For example, a single guide polynucleotide can be utilized for a cytidine base editor and an adenosine base editor.

[0235] In other embodiments, a guide polynucleotide can comprise both the polynucleotide targeting portion of the nucleic acid and the scaffold portion of the nucleic acid in a single molecule (i.e., a single-molecule guide nucleic acid). For example, a single-molecule guide polynucleotide can be a single guide RNA (sgRNA or gRNA). Herein the term guide polynucleotide sequence contemplates any single, dual or multi-molecule nucleic acid capable of interacting with and directing a base editor to a target polynucleotide sequence.

[0236] Typically, a guide polynucleotide (e.g., crRNA/trRNA complex or a gRNA) comprises a “polynucleotide-targeting segment” that includes a sequence capable of recognizing and binding to a target polynucleotide sequence, and a “protein-binding segment” that stabilizes the guide polynucleotide within a polynucleotide programmable nucleotide binding domain component of a base editor. In some embodiments, the polynucleotide targeting segment of the guide polynucleotide recognizes and binds to a DNA polynucleotide, thereby facilitating the editing of a base in DNA. In other cases, the polynucleotide targeting segment of the guide polynucleotide recognizes and binds to an RNA polynucleotide, thereby facilitating the editing of a base in RNA. Herein a “segment” refers to a section or region of a molecule, e.g., a contiguous stretch of nucleotides in the guide polynucleotide. A segment can also refer to a region/section of a complex such that a segment can comprise regions of more than one molecule. For example, where a guide polynucleotide comprises multiple nucleic acid molecules, the protein-binding segment of can include all or a portion of multiple separate molecules that are for instance hybridized along a region of complementarity. In some embodiments, a protein-binding segment of a DNA-targeting RNA that comprises two separate molecules can comprise (i) base pairs 40-75 of a first RNA molecule that is 100 base pairs in length; and (ii) base pairs 10-25 of a second RNA molecule that is 50 base pairs in length. The definition of “segment,” unless otherwise specifically defined in a particular context, is not limited to a specific number of total base pairs, is not limited to any particular number of base pairs from a given RNA molecule, is not limited to a particular number of separate molecules within a complex, and can include regions of RNA molecules that are of any total length and can include regions with complementarity to other molecules.

[0237] A guide RNA or a guide polynucleotide can comprise two or more RNAs, e.g., CRISPR RNA (crRNA) and transactivating crRNA (tracrRNA). A guide RNA or a guide polynucleotide can sometimes comprise a single-chain RNA, or single guide RNA (sgRNA) formed by fusion of a portion (e.g., a functional portion) of crRNA and tracrRNA. A guide RNA or a guide polynucleotide can also be a dual RNA comprising a crRNA and a tracrRNA. Furthermore, a crRNA can hybridize with a target DNA.

[0238] As discussed above, a guide RNA or a guide polynucleotide can be an expression product. For example, a DNA that encodes a guide RNA can be a vector comprising a sequence coding for the guide RNA. A guide RNA or a guide polynucleotide can be transferred into a cell by transfecting the cell with an isolated guide RNA or plasmid DNA comprising a sequence coding for the guide RNA and a promoter. A guide RNA or a guide polynucleotide can also be transferred into a cell in other way, such as using virus-mediated gene delivery.

[0239] A guide RNA or a guide polynucleotide can be isolated. For example, a guide RNA can be transfected in the form of an isolated RNA into a cell or organism. A guide RNA can be prepared by in vitro transcription using any in vitro transcription system known in the art. A guide RNA can be transferred to a cell in the form of isolated RNA rather than in the form of plasmid comprising encoding sequence for a guide RNA.

[0240] A guide RNA or a guide polynucleotide can comprise three regions: a first region at the 5′ end that can be complementary to a target site in a chromosomal sequence, a second internal region that can form a stem loop structure, and a third 3′ region that can be single-stranded. A first region of each guide RNA can also be different such that each guide RNA guides a fusion protein to a specific target site. Further, second and third regions of each guide RNA can be identical in all guide RNAs.

[0241] A first region of a guide RNA or a guide polynucleotide can be complementary to sequence at a target site in a chromosomal sequence such that the first region of the guide RNA can base pair with the target site. In some cases, a first region of a guide RNA can comprise from or from about 10 nucleotides to 25 nucleotides (i.e., from 10 nucleotides to nucleotides; or from about 10 nucleotides to about 25 nucleotides; or from 10 nucleotides to about 25 nucleotides; or from about 10 nucleotides to 25 nucleotides) or more. For example, a region of base pairing between a first region of a guide RNA and a target site in a chromosomal sequence can be or can be about 10, 11, 12, 13, 14, 15, 16, 17, 18, 19, 20, 22, 23, 24, 25, or more nucleotides in length. Sometimes, a first region of a guide RNA can be or can be about 19, 20, or 21 nucleotides in length.

[0242] A guide RNA or a guide polynucleotide can also comprise a second region that forms a secondary structure. For example, a secondary structure formed by a guide RNA can comprise a stem (or hairpin) and a loop. A length of a loop and a stem can vary. For example, a loop can range from or from about 3 to 10 nucleotides in length, and a stem can range from or from about 6 to 20 base pairs in length. A stem can comprise one or more bulges of 1 to 10 or about 10 nucleotides. The overall length of a second region can range from or from about 16 to 60 nucleotides in length. For example, a loop can be or can be about 4 nucleotides in length and a stem can be or can be about 12 base pairs.

[0243] A guide RNA or a guide polynucleotide can also comprise a third region at the 3′ end that can be essentially single-stranded. For example, a third region is sometimes not complementarity to any chromosomal sequence in a cell of interest and is sometimes not complementarity to the rest of a guide RNA. Further, the length of a third region can vary. A third region can be more than or more than about 4 nucleotides in length. For example, the length of a third region can range from or from about 5 to 60 nucleotides in length.

[0244] A guide RNA or a guide polynucleotide can target any exon or intron of a gene target. In some cases, a guide can target exon 1 or 2 of a gene, in other cases; a guide can target exon 3 or 4 of a gene. A composition can comprise multiple guide RNAs that all target the same exon or in some cases, multiple guide RNAs that can target different exons. An exon and an intron of a gene can be targeted.

[0245] A guide RNA or a guide polynucleotide can target a nucleic acid sequence of or of about 20 nucleotides. A target nucleic acid can be less than or less than about 20 nucleotides. A target nucleic acid can be at least or at least about 5, 10, 15, 16, 17, 18, 19, 20, 21, 22, 23, 24, 25, 30, or anywhere between 1-100 nucleotides in length. A target nucleic acid can be at most or at most about 5, 10, 15, 16, 17, 18, 19, 20, 21, 22, 23, 24, 25, 30, 40, 50, or anywhere between 1-100 nucleotides in length. A target nucleic acid sequence can be or can be about 20 bases immediately 5′ of the first nucleotide of the PAM. A guide RNA can target a nucleic acid sequence. A target nucleic acid can be at least or at least about 1-10, 1-20, 1-30, 1-40, 1-50, 1-60, 1-70, 1-80, 1-90, or 1-100 nucleotides.

[0246] A guide polynucleotide, for example, a guide RNA, can refer to a nucleic acid that can hybridize to another nucleic acid, for example, the target nucleic acid or protospacer in a genome of a cell. A guide polynucleotide can be RNA. A guide polynucleotide can be DNA. The guide polynucleotide can be programmed or designed to bind to a sequence of nucleic acid site-specifically. A guide polynucleotide can comprise a polynucleotide chain and can be called a single guide polynucleotide. A guide polynucleotide can comprise two polynucleotide chains and can be called a double guide polynucleotide. A guide RNA can be introduced into a cell or embryo as an RNA molecule. For example, a RNA molecule can be transcribed in vitro and/or can be chemically synthesized. An RNA can be transcribed from a synthetic DNA molecule, e.g., a gBlocks® gene fragment. A guide RNA can then be introduced into a cell or embryo as an RNA molecule. A guide RNA can also be introduced into a cell or embryo in the form of a non-RNA nucleic acid molecule, e.g., DNA molecule. For example, a DNA encoding a guide RNA can be operably linked to promoter control sequence for expression of the guide RNA in a cell or embryo of interest. A RNA coding sequence can be operably linked to a promoter sequence that is recognized by RNA polymerase III (Pol III). Plasmid vectors that can be used to express guide RNA include, but are not limited to, px330 vectors and px333 vectors. In some cases, a plasmid vector (e.g., px333 vector) can comprise at least two guide RNA-encoding DNA sequences.

[0247] Methods for selecting, designing, and validating guide polynucleotides, e.g., guide RNAs and targeting sequences are described herein and known to those skilled in the art. For example, to minimize the impact of potential substrate promiscuity of a deaminase domain in the nucleobase editor system (e.g., an AID domain), the number of residues that could unintentionally be targeted for deamination (e.g., off-target C residues that could potentially reside on ssDNA within the target nucleic acid locus) may be minimized. In addition, software tools can be used to optimize the gRNAs corresponding to a target nucleic acid sequence, e.g., to minimize total off-target activity across the genome. For example, for each possible targeting domain choice using S. pyogenes Cas9, all off-target sequences (preceding selected PAMs, e.g., NAG or NGG) may be identified across the genome that contain up to certain number (e.g., 1, 2, 3, 4, 5, 6, 7, 8, 9, or 10) of mismatched base-pairs. First regions of gRNAs complementary to a target site can be identified, and all first regions (e.g., crRNAs) can be ranked according to its total predicted off-target score; the top-ranked targeting domains represent those that are likely to have the greatest on-target and the least off-target activity. Candidate targeting gRNAs can be functionally evaluated by using methods known in the art and/or as set forth herein.

[0248] As a non-limiting example, target DNA hybridizing sequences in crRNAs of a guide RNA for use with Cas9s may be identified using a DNA sequence searching algorithm. gRNA design may be carried out using custom gRNA design software based on the public tool cas-offinder as described in Bae S., Park J., & Kim J.-S. Cas-OFFinder: A fast and versatile algorithm that searches for potential off-target sites of Cas9 RNA-guided endonucleases. Bioinformatics 30, 1473-1475 (2014). This software scores guides after calculating their genome-wide off-target propensity. Typically matches ranging from perfect matches to 7 mismatches are considered for guides ranging in length from 17 to 24. Once the off-target sites are computationally-determined, an aggregate score is calculated for each guide and summarized in a tabular output using a web-interface. In addition to identifying potential target sites adjacent to PAM sequences, the software also identifies all PAM adjacent sequences that differ by 1, 2, 3 or more than 3 nucleotides from the selected target sites. Genomic DNA sequences for a target nucleic acid sequence, e.g., a target gene may be obtained and repeat elements may be screened using publically available tools, for example, the RepeatMasker program. RepeatMasker searches input DNA sequences for repeated elements and regions of low complexity. The output is a detailed annotation of the repeats present in a given query sequence.

[0249] Following identification, first regions of guide RNAs, e.g., crRNAs, may be ranked into tiers based on their distance to the target site, their orthogonality and presence of 5′ nucleotides for close matches with relevant PAM sequences (for example, a 5′ G based on identification of close matches in the human genome containing a relevant PAM e.g., NGG PAM for S. pyogenes, NNGRRT or NNGRRV PAM for S. aureus). As used herein, orthogonality refers to the number of sequences in the human genome that contain a minimum number of mismatches to the target sequence. A “high level of orthogonality” or “good orthogonality” may, for example, refer to 20-mer targeting domains that have no identical sequences in the human genome besides the intended target, nor any sequences that contain one or two mismatches in the target sequence. Targeting domains with good orthogonality may be selected to minimize off-target DNA cleavage.

[0250] In some embodiments, a reporter system may be used for detecting base-editing activity and testing candidate guide polynucleotides. In some embodiments, a reporter system may comprise a reporter gene based assay where base editing activity leads to expression of the reporter gene. For example, a reporter system may include a reporter gene comprising a deactivated start codon, e.g., a mutation on the template strand from 3′-TAC-S′ to 3′-CAC-S′. Upon successful deamination of the target C, the corresponding mRNA will be transcribed as 5′-AUG-3′ instead of 5′-GUG-3′, enabling the translation of the reporter gene. Suitable reporter genes will be apparent to those of skill in the art. Non-limiting examples of reporter genes include gene encoding green fluorescence protein (GFP), red fluorescence protein (RFP), luciferase, secreted alkaline phosphatase (SEAP), or any other gene whose expression are detectable and apparent to those skilled in the art. The reporter system can be used to test many different gRNAs, e.g., in order to determine which residue(s) with respect to the target DNA sequence the respective deaminase will target. sgRNAs that target non-template strand can also be tested in order to assess off-target effects of a specific base editing protein, e.g., a Cas9 deaminase fusion protein. In some embodiments, such gRNAs can be designed such that the mutated start codon will not be base-paired with the gRNA. The guide polynucleotides can comprise standard ribonucleotides, modified ribonucleotides (e.g., pseudouridine), ribonucleotide isomers, and/or ribonucleotide analogs. In some embodiments, the guide polynucleotide can comprise at least one detectable label. The detectable label can be a fluorophore (e.g., FAM, TMR, Cy3, Cy5, Texas Red, Oregon Green, Alexa Fluors, Halo tags, or suitable fluorescent dye), a detection tag (e.g., biotin, digoxigenin, and the like), quantum dots, or gold particles.

[0251] The guide polynucleotides can be synthesized chemically, synthesized enzymatically, or a combination thereof. For example, the guide RNA can be synthesized using standard phosphoramidite-based solid-phase synthesis methods. Alternatively, the guide RNA can be synthesized in vitro by operably linking DNA encoding the guide RNA to a promoter control sequence that is recognized by a phage RNA polymerase. Examples of suitable phage promoter sequences include T7, T3, SP6 promoter sequences, or variations thereof. In embodiments in which the guide RNA comprises two separate molecules (e.g., crRNA and tracrRNA), the crRNA can be chemically synthesized and the tracrRNA can be enzymatically synthesized.

[0252] In some embodiments, a base editor system may comprise multiple guide polynucleotides, e.g., gRNAs. For example, the gRNAs may target to one or more target loci (e.g., at least 1 gRNA, at least 2 gRNA, at least 5 gRNA, at least 10 gRNA, at least 20 gRNA, at least 30 g RNA, at least 50 gRNA) comprised in a base editor system. The multiple gRNA sequences can be tandemly arranged and are preferably separated by a direct repeat.

[0253] A DNA sequence encoding a guide RNA or a guide polynucleotide can also be part of a vector. Further, a vector can comprise additional expression control sequences (e.g., enhancer sequences, Kozak sequences, polyadenylation sequences, transcriptional termination sequences, etc.), selectable marker sequences (e.g., GFP or antibiotic resistance genes such as puromycin), origins of replication, and the like. A DNA molecule encoding a guide RNA can also be linear. A DNA molecule encoding a guide RNA or a guide polynucleotide can also be circular.

[0254] In some embodiments, one or more components of a base editor system may be encoded by DNA sequences. Such DNA sequences may be introduced into an expression system, e.g., a cell, together or separately. For example, DNA sequences encoding a polynucleotide programmable nucleotide binding domain and a guide RNA may be introduced into a cell, each DNA sequence can be part of a separate molecule (e.g., one vector containing the polynucleotide programmable nucleotide binding domain coding sequence and a second vector containing the guide RNA coding sequence) or both can be part of a same molecule (e.g., one vector containing coding (and regulatory) sequence for both the polynucleotide programmable nucleotide binding domain and the guide RNA).

[0255] A guide polynucleotide can comprise one or more modifications to provide a nucleic acid with a new or enhanced feature. A guide polynucleotide can comprise a nucleic acid affinity tag. A guide polynucleotide can comprise synthetic nucleotide, synthetic nucleotide analog, nucleotide derivatives, and/or modified nucleotides.

[0256] In some cases, a gRNA or a guide polynucleotide can comprise modifications. A modification can be made at any location of a gRNA or a guide polynucleotide. More than one modification can be made to a single gRNA or a guide polynucleotide. A gRNA or a guide polynucleotide can undergo quality control after a modification. In some cases, quality control can include PAGE, HPLC, MS, or any combination thereof.

[0257] A modification of a gRNA or a guide polynucleotide can be a substitution, insertion, deletion, chemical modification, physical modification, stabilization, purification, or any combination thereof.

[0258] A gRNA or a guide polynucleotide can also be modified by 5′ adenylate, 5′ guanosine-triphosphate cap, 5′N7-Methylguanosine-triphosphate cap, 5′ triphosphate cap, 3′ phosphate, 3′ thiophosphate, 5′ phosphate, 5′ thiophosphate, Cis-Syn thymidine dimer, trimers, C12 spacer, C3 spacer, C6 spacer, dSpacer, PC spacer, rSpacer, Spacer 18, Spacer 9,3′-3′ modifications, 5′-5′ modifications, abasic, acridine, azobenzene, biotin, biotin BB, biotin TEG, cholesteryl TEG, desthiobiotin TEG, DNP TEG, DNP-X, DOTA, dT-Biotin, dual biotin, PC biotin, psoralen C2, psoralen C6, TINA, 3′DABCYL, black hole quencher 1, black hole quencer 2, DABCYL SE, dT-DABCYL, IRDye QC-1, QSY-21, QSY-35, QSY-7, QSY-9, carboxyl linker, thiol linkers, 2′-deoxyribonucleoside analog purine, 2′-deoxyribonucleoside analog pyrimidine, ribonucleoside analog, 2′-O-methyl ribonucleoside analog, sugar modified analogs, wobble/universal bases, fluorescent dye label, 2′-fluoro RNA, 2′-O-methyl RNA, methylphosphonate, phosphodiester DNA, phosphodiester RNA, phosphothioate DNA, phosphorothioate RNA, UNA, pseudouridine-5′-triphosphate, 5′-methylcytidine-5′-triphosphate, or any combination thereof.

[0259] In some cases, a modification is permanent. In other cases, a modification is transient. In some cases, multiple modifications are made to a gRNA or a guide polynucleotide. A gRNA or a guide polynucleotide modification can alter physiochemical properties of a nucleotide, such as their conformation, polarity, hydrophobicity, chemical reactivity, base-pairing interactions, or any combination thereof.

[0260] The PAM sequence can be any PAM sequence known in the art. Suitable PAM sequences include, but are not limited to, NGG, NGA, NGC, NGN, NGT, NGCG, NGAG, NGAN, NGNG, NGCN, NGCG, NGTN, NNGRRT, NNNRRT, NNGRR(N), TTTV, TYCV, TYCV, TATV, NNNNGATT, NNAGAAW, or NAAAAC. Y is a pyrimidine; N is any nucleotide base; W is A or T.

[0261] A modification can also be a phosphorothioate substitute. In some cases, a natural phosphodiester bond can be susceptible to rapid degradation by cellular nucleases and; a modification of internucleotide linkage using phosphorothioate (PS) bond substitutes can be more stable towards hydrolysis by cellular degradation. A modification can increase stability in a gRNA or a guide polynucleotide. A modification can also enhance biological activity. In some cases, a phosphorothioate enhanced RNA gRNA can inhibit RNase A, RNase T1, calf serum nucleases, or any combinations thereof. These properties can allow the use of PS-RNA gRNAs to be used in applications where exposure to nucleases is of high probability in vivo or in vitro. For example, phosphorothioate (PS) bonds can be introduced between the last 3-5 nucleotides at the 5′- or “-end of a gRNA which can inhibit exonuclease degradation. In some cases, phosphorothioate bonds can be added throughout an entire gRNA to reduce attack by endonucleases.

### Protospacer Adjacent Motif

[0262] The term “protospacer adjacent motif (PAM)” or PAM-like motif refers to a 2-6 base pair DNA sequence immediately following the DNA sequence targeted by the Cas9 nuclease in the CRISPR bacterial adaptive immune system. In some embodiments, the PAM can be a 5′ PAM (i.e., located upstream of the 5′ end of the protospacer). In other embodiments, the PAM can be a 3′ PAM (i.e., located downstream of the 5′ end of the protospacer).

[0263] The PAM sequence is essential for target binding, but the exact sequence depends on a type of Cas protein.

[0264] A base editor provided herein can comprise a CRISPR protein-derived domain that is capable of binding a nucleotide sequence that contains a canonical or non-canonical protospacer adjacent motif (PAM) sequence. A PAM site is a nucleotide sequence in proximity to a target polynucleotide sequence. Some aspects of the disclosure provide for base editors comprising all or a portion of CRISPR proteins that have different PAM specificities. For example, typically Cas9 proteins, such as Cas9 from S. pyogenes (spCas9), require a canonical NGG PAM sequence to bind a particular nucleic acid region, where the “N” in “NGG” is adenine (A), thymine (T), guanine (G), or cytosine (C), and the G is guanine. A PAM can be CRISPR protein-specific and can be different between different base editors comprising different CRISPR protein-derived domains. A PAM can be 5′ or 3′ of a target sequence. A PAM can be upstream or downstream of a target sequence. A PAM can be 1, 2, 3, 4, 5, 6, 7, 8, 9, 10 or more nucleotides in length. Often, a PAM is between 2-6 nucleotides in length. Several PAM variants are described in Table 1 below.

TABLE 1
Cas9 proteins and corresponding PAM sequences

| Variant | PAM |
|---|---|
| spCas9 | NGG |
| spCas9-VRQR | NGA |
| spCas9-VRER | NGCG |
| xCas9 (sp) | NGN |
| saCas9 | NNGRRT |
| saCas9-KKH | NNNRRT |
| spCas9-MQKSER | NGCG |
| spCas9-MQKSER | NGCN |
| spCas9-LRKIQK | NGTN |
| spCas9-LRVSQK | NGTN |
| spCas9-LRVSQL | NGTN |
| SpyMacCas9 | NAA |
| Cpfl | 5′ (TTTV) |

[0265] In some embodiments, the PAM is NGT. In some embodiments, the NGT PAM is a variant. In some embodiments, the NGT PAM variant is created through targeted mutations at one or more residues 1335, 1337, 1135, 1136, 1218, and/or 1219. In some embodiments, the NGT PAM variant is created through targeted mutations at one or more residues 1219, 1335, 1337, 1218. In some embodiments, the NGT PAM variant is created through targeted mutations at one or more residues 1135, 1136, 1218, 1219, and 1335. In some embodiments, the NGT PAM variant is selected from the set of targeted mutations provided in Tables 2 and 3 below.

TABLE 2
NGT PAM Variant Mutations at residues
1219, 1335, 1337, 1218

| Variant | E1219V | R1335Q | T1337 | G1218 |
|---|---|---|---|---|
| 1 | F | V | T | |
| 2 | F | V | R | |
| 3 | F | V | Q | |
| 4 | F | V | L | |
| 5 | F | V | T | R |
| 6 | F | V | R | R |
| 7 | F | V | Q | R |
| 8 | F | V | L | R |
| 9 | L | L | T | |
| 10 | L | L | R | |
| 11 | L | L | Q | |
| 12 | L | L | L | |
| 13 | F | I | T | |
| 14 | F | I | R | |
| 15 | F | I | Q | |
| 16 | F | I | L | |
| 17 | F | G | C | |
| 18 | H | L | N | |
| 19 | F | G | C | A |
| 20 | H | L | N | V |
| 21 | L | A | W | |
| 22 | L | A | F | |
| 23 | L | A | Y | |
| 24 | I | A | W | |
| 25 | I | A | F | |
| 26 | I | A | Y | |

TABLE 3
NGT PAM Variant Mutations at residues 1135, 1136,
1218, 1219, and 1335

| Variant | D1135L | S1136R | G1218S | E1219V | R1335Q |
|---|---|---|---|---|---|
| 27 | G | | | | |
| 28 | V | | | | |
| 29 | I | | | | |
| 30 | | A | | | |
| 31 | | W | | | |
| 32 | | H | | | |
| 33 | | K | | | |
| 34 | | | K | | |
| 35 | | | R | | |
| 36 | | | Q | | |
| 37 | | | T | | |
| 38 | | | N | | |
| 39 | | | | I | |
| 40 | | | | A | |
| 41 | | | | N | |
| 42 | | | | Q | |
| 43 | | | | G | |
| 44 | | | | L | |
| 45 | | | | S | |
| 46 | | | | T | |
| 47 | | | | | L |
| 48 | | | | | I |
| 49 | | | | | V |
| 50 | | | | | N |
| 51 | | | | | S |
| 52 | | | | | T |
| 53 | | | | | F |
| 54 | | | | | Y |
| 55 | N1286Q | I1331F | | | |

[0266] In some embodiments, the NGT PAM variant is selected from variant 5, 7, 28, 31, or 36 in Tables 2 and 3. In some embodiments, the variants have improved NGT PAM recognition.

[0267] In some embodiments, the NGT PAM variants have mutations at residues 1219, 1335, 1337, and/or 1218. In some embodiments, the NGT PAM variant is selected with mutations for improved recognition from the variants provided in Table 4 below.

TABLE 4
NGT PAM Variant Mutations at residues
1219, 1335, 1337, and 1218

| Variant | E1219V | R1335Q | T1337 | G1218 |
|---|---|---|---|---|
| 1 | F | V | T | |
| 2 | F | V | R | |
| 3 | F | V | Q | |
| 4 | F | V | L | |
| 5 | F | V | T | R |
| 6 | F | V | R | R |
| 7 | F | V | Q | R |
| 8 | F | V | L | R |

[0268] In some embodiments, the NGT PAM is selected from the variants provided in Table 5 below.

TABLE 5
NGT PAM variants

| | NGTN | | | | | | | |
|---|---|---|---|---|---|---|---|---|
| | variant | D1135 | S1136 | G1218 | E1219 | A1322R | R1335 | T1337 |
| Variant 1 | LRKIQK | L | R | K | I | — | Q | K |
| Variant 2 | LRSVQK | L | R | S | V | — | Q | K |
| Variant 3 | LRSVQL | L | R | S | V | — | Q | L |
| Variant 4 | LRKIRQK | L | R | K | I | R | Q | K |
| Variant 5 | LRSVRQK | L | R | S | V | R | Q | K |
| Variant 6 | LRSVRQL | L | R | S | V | R | Q | L |

[0269] In some embodiments, the Cas9 domain is a Cas9 domain from Streptococcus pyogenes (SpCas9). In some embodiments, the SpCas9 domain is a nuclease active SpCas9, a nuclease inactive SpCas9 (SpCas9d), or a SpCas9 nickase (SpCas9n). In some embodiments, the SpCas9 comprises a D9X mutation, or a corresponding mutation in any of the amino acid sequences provided herein, wherein X is any amino acid except for D. In some embodiments, the SpCas9 comprises a D9A mutation, or a corresponding mutation in any of the amino acid sequences provided herein. In some embodiments, the SpCas9 domain, the SpCas9d domain, or the SpCas9n domain can bind to a nucleic acid sequence having a non-canonical PAM. In some embodiments, the SpCas9 domain, the SpCas9d domain, or the SpCas9n domain can bind to a nucleic acid sequence having an NGG, a NGA, or a NGCG PAM sequence.

[0270] In some embodiments, the SpCas9 domain comprises one or more of a D1135X, a R1335X, and a T1336X mutation, or a corresponding mutation in any of the amino acid sequences provided herein, wherein X is any amino acid. In some embodiments, the SpCas9 domain comprises one or more of a D1135E, R1335Q, and T1336R mutation, or a corresponding mutation in any of the amino acid sequences provided herein. In some embodiments, the SpCas9 domain comprises a D1135E, a R1335Q, and a T1336R mutation, or corresponding mutations in any of the amino acid sequences provided herein. In some embodiments, the SpCas9 domain comprises one or more of a D1135X, a R1335X, and a T1336X mutation, or a corresponding mutation in any of the amino acid sequences provided herein, wherein X is any amino acid. In some embodiments, the SpCas9 domain comprises one or more of a D1135V, a R1335Q, and a T1336R mutation, or a corresponding mutation in any of the amino acid sequences provided herein. In some embodiments, the SpCas9 domain comprises a D1135V, a R1335Q, and a T1336R mutation, or corresponding mutations in any of the amino acid sequences provided herein. In some embodiments, the SpCas9 domain comprises one or more of a D1135X, a G1217X, a R1335X, and a T1336X mutation, or a corresponding mutation in any of the amino acid sequences provided herein, wherein X is any amino acid. In some embodiments, the SpCas9 domain comprises one or more of a D1135V, a G1217R, a R1335Q, and a T1336R mutation, or a corresponding mutation in any of the amino acid sequences provided herein. In some embodiments, the SpCas9 domain comprises a D1135V, a G1217R, a R1335Q, and a T1336R mutation, or corresponding mutations in any of the amino acid sequences provided herein.

[0271] In some embodiments, the Cas9 domains of any of the fusion proteins provided herein comprises an amino acid sequence that is at least 60%, at least 65%, at least 70%, at least 75%, at least 80%, at least 85%, at least 90%, at least 95%, at least 96%, at least 97%, at least 98%, at least 99%, or at least 99.5% identical to a Cas9 polypeptide described herein. In some embodiments, the Cas9 domains of any of the fusion proteins provided herein comprises the amino acid sequence of any Cas9 polypeptide described herein. In some embodiments, the Cas9 domains of any of the fusion proteins provided herein consists of the amino acid sequence of any Cas9 polypeptide described herein.

[0272] In some examples, a PAM recognized by a CRISPR protein-derived domain of a base editor disclosed herein can be provided to a cell on a separate oligonucleotide to an insert (e.g., an AAV insert) encoding the base editor. In such embodiments, providing PAM on a separate oligonucleotide can allow cleavage of a target sequence that otherwise would not be able to be cleaved, because no adjacent PAM is present on the same polynucleotide as the target sequence.

[0273] In an embodiment, S. pyogenes Cas9 (SpCas9) can be used as a CRISPR endonuclease for genome engineering. However, others can be used. In some embodiments, a different endonuclease can be used to target certain genomic targets. In some embodiments, synthetic SpCas9-derived variants with non-NGG PAM sequences can be used. Additionally, other Cas9 orthologues from various species have been identified and these “non-SpCas9s” can bind a variety of PAM sequences that can also be useful for the present disclosure. For example, the relatively large size of SpCas9 (approximately 4 kilobase (kb) coding sequence) can lead to plasmids carrying the SpCas9 cDNA that cannot be efficiently expressed in a cell. Conversely, the coding sequence for Staphylococcus aureus Cas9 (SaCas9) is approximately 1 kilobase shorter than SpCas9, possibly allowing it to be efficiently expressed in a cell. Similar to SpCas9, the SaCas9 endonuclease is capable of modifying target genes in mammalian cells in vitro and in mice in vivo. In some embodiments, a Cas protein can target a different PAM sequence. In some embodiments, a target gene can be adjacent to a Cas9 PAM, 5′-NGG, for example. In other embodiments, other Cas9 orthologs can have different PAM requirements. For example, other PAMs such as those of S. thermophilus (5′-NNAGAA for CRISPR1 and 5′-NGGNG for CRISPR3) and Neisseria meningiditis (5′-NNNNGATT) can also be found adjacent to a target gene.

[0274] In some embodiments, for a S. pyogenes system, a target gene sequence can precede (i.e., be 5′ to) a 5′-NGG PAM, and a 20-nt guide RNA sequence can base pair with an opposite strand to mediate a Cas9 cleavage adjacent to a PAM. In some embodiments, an adjacent cut can be or can be about 3 base pairs upstream of a PAM. In some embodiments, an adjacent cut can be or can be about 10 base pairs upstream of a PAM. In some embodiments, an adjacent cut can be or can be about 0-20 base pairs upstream of a PAM. For example, an adjacent cut can be next to, 1, 2, 3, 4, 5, 6, 7, 8, 9, 10, 11, 12, 13, 14, 15, 16, 17, 18, 19, 20, 21, 22, 23, 24, 25, 26, 27, 28, 29, or 30 base pairs upstream of a PAM. Aₙ adjacent cut can also be downstream of a PAM by 1 to 30 base pairs. The sequences of exemplary SpCas9 proteins capable of binding a PAM sequence follow:

[0275] The amino acid sequence of an exemplary PAM-binding SpCas9 is as follows:

[sequence omitted]

[0276] The amino acid sequence of an exemplary PAM-binding SpCas9n is as follows:

MDKKYSIGLAIGTNSVGWAVITDEYKVPSKKFKVLGNTDRHSIKKNLIGAL
LFDSGETAEATRLKRTARRRYTRRKNRICYLQEIFSNEMAKVDDSFFHRLE
ESFLVEEDKKHERHPIFGNIVDEVAYHEKYPTIYHLRKKLVDSTDKADLRL
IYLALAHMIKFRGHFLIEGDLNPDNSDVDKLFIQLVQTYNQLFEENPINAS
GVDAKAILSARLSKSRRLENLIAQLPGEKKNGLFGNLIALSLGLTPNFKSN
FDLAEDAKLQLSKDTYDDDLDNLLAQIGDQYADLFLAAKNLSDAILLSDIL
RVNTEITKAPLSASMIKRYDEHHQDLTLLKALVRQQLPEKYKEIFFDQSKN
GYAGYIDGGASQEEFYKFIKPILEKMDGTEELLVKLNREDLLRKQRTFDNG
SIPHQIHLGELHAILRRQEDFYPFLKDNREKIEKILTFRIPYYVGPLARGN
SRFAWMTRKSEETITPWNFEEVVDKGASAQSFIERMTNFDKNLPNEKVLPK
HSLLYEYFTVYNELTKVKYVTEGMRKPAFLSGEQKKAIVDLLFKTNRKVTV
KQLKEDYFKKIECFDSVEISGVEDRFNASLGTYHDLLKIIKDKDFLDNEEN
EDILEDIVLTLTLFEDREMIEERLKTYAHLFDDKVMKQLKRRRYTGWGRLS
RKLINGIRDKQSGKTILDFLKSDGFANRNFMQLIHDDSLTFKEDIQKAQVS
GQGDSLHEHIANLAGSPAIKKGILQTVKVVDELVKVMGRHKPENIVIEMAR
ENQTTQKGQKNSRERMKRIEEGIKELGSQILKEHPVENTQLQNEKLYLYYL
QNGRDMYVDQELDINRLSDYDVDHIVPQSFLKDDSIDNKVLTRSDKNRGKS
DNVPSEEVVKKMKNYWRQLLNAKLITQRKFDNLTKAERGGLSELDKAGFIK
RQLVETRQITKHVAQILDSRMNTKYDENDKLIREVKVITLKSKLVSDFRKD
FQFYKVREINNYHHAHDAYLNAVVGTALIKKYPKLESEFVYGDYKVYDVRK
MIAKSEQEIGKATAKYFFYSNIMNFFKTEITLANGEIRKRPLIETNGETGE
IVWDKGRDFATVRKVLSMPQVNIVKKTEVQTGGFSKESILPKRNSDKLIAR
KKDWDPKKYGGFDSPTVAYSVLVVAKVEKGKSKKLKSVKELLGITIMERSS
FEKNPIDFLEAKGYKEVKKDLIIKLPKYSLFELENGRKRMLASAGELQKGN
ELALPSKYVNFLYLASHYEKLKGSPEDNEQKQLFVEQHKHYLDEIIEQISE
FSKRVILADANLDKVLSAYNKHRDKPIREQAENIIHLFTLTNLGAPAAFKY
FDTTIDRKRYTSTKEVLDATLIHQSITGLYETRIDLSQLGGD.

[0277] The amino acid sequence of an exemplary PAM-binding SpEQR Cas9 is as follows:

MDKKYSIGLAIGTNSVGWAVITDEYKVPSKKFKVLGNTDRHSIKKNLIGAL
LFDSGETAEATRLKRTARRRYTRRKNRICYLQEIFSNEMAKVDDSFFHRLE
ESFVEEDKKHERHPIFGNIVDEVAYHEKYPTIYHLRKKLVDSTDKADLRLI
YLALAHMIKFRGHFLIEGDLNPDNSDVDKLFIQLVQTYNQLFEENPINASG
VDAKAILSARLSKSRRLENLIAQLPGEKKNGLFGNLIALSLGLTPNFKSNF
DLAEDAKLQLSKDTYDDDLDNLLAQIGDQYADLFLAAKNLSDAILLSDILR
VNTEITKAPLSASMIKRYDEHHQDLTLLKALVRQQLPEKYKEIFFDQSKNG
YAGYIDGGASQEEFYKFIKPILEKMDGTEELLVKLNREDLLRKQRTFDNGS
IPHQIHLGELHAILRRQEDFYPFLKDNREKIEKILTFRIPYYVGPLARGNS
RFAWMTRKSEETITPWNFEEVVDKGASAQSFIERMTNFDKNLPNEKVLPKH
SLLYEYFTVYNELTKVKYVTEGMRKPAFLSGEQKKAIVDLLFKTNRKVTVK
QLKEDYFKKIECFDSVEISGVEDRFNASLGTYHDLLKIIKDKDFLDNEENE
DILEDIVLTLTLFEDREMIEERLKTYAHLFDDKVMKQLKRRRYTGWGRLSR
KLINGIRDKQSGKTILDFLKSDGFANRNFMQLIHDDSLTFKEDIQKAQVSG
QGDSLHEHIANLAGSPAIKKGILQTVKVVDELVKVMGRHKPENIVIEMARE
NQTTQKGQKNSRERMKRIEEGIKELGSQILKEHPVENTQLQNEKLYLYYLQ
NGRDMYVDQELDINRLSDYDVDHIVPQSFLKDDSIDNKVLTRSDKNRGKSD
NVPSEEVVKKMKNYWRQLLNAKLITQRKFDNLTKAERGGLSELDKAGFIKR
QLVETRQITKHVAQILDSRMNTKYDENDKLIREVKVITLKSKLVSDFRKDF
QFYKVREINNYHHAHDAYLNAVVGTALIKKYPKLESEFVYGDYKVYDVRKM
IAKSEQEIGKATAKYFFYSNIMNFFKTEITLANGEIRKRPLIETNGETGEI
VWDKGRDFATVRKVLSMPQVNIVKKTEVQTGGFSKESILPKRNSDKLIARK
KDWDPKKYGGFESPTVAYSVLVVAKVEKGKSKKLKSVKELLGITIMERSSF
EKNPIDFLEAKGYKEVKKDLIIKLPKYSLFELENGRKRMLASAGELQKGNE
LALPSKYVNFLYLASHYEKLKGSPEDNEQKQLFVEQHKHYLDEIIEQISEF
SKRVILADANLDKVLSAYNKHRDKPIREQAENIIHLFTLTNLGAPAAFKYF
DTTIDRKQYRSTKEVLDATLIHQSITGLYETRIDLSQLGGD.

[0278] In this sequence, residues E1135, Q1335 and R1337, which can be mutated from D1135, R1335, and T1337 to yield a SpEQR Cas9, are underlined and in bold.

[0279] The amino acid sequence of an exemplary PAM-binding SpVQR Cas9 is as follows:

MDKKYSIGLAIGTNSVGWAVITDEYKVPSKKFKVLGNTDRHSIKKNLIGAL
LFDSGETAEATRLKRTARRRYTRRKNRICYLQEIFSNEMAKVDDSFFHRLE
ESFLVEEDKKHERHPIFGNIVDEVAYHEKYPTIYHLRKKLVDSTDKADLRL
IYLALAHMIKFRGHFLIEGDLNPDNSDVDKLFIQLVQTYNQLFEENPINAS
GVDAKAILSARLSKSRRLENLIAQLPGEKKNGLFGNLIALSLGLTPNFKSN
FDLAEDAKLQLSKDTYDDDLDNLLAQIGDQYADLFLAAKNLSDAILLSDIL
RVNTEITKAPLSASMIKRYDEHHQDLTLLKALVRQQLPEKYKEIFFDQSKN
GYAGYIDGGASQEEFYKFIKPILEKMDGTEELLVKLNREDLLRKQRTFDNG
SIPHQIHLGELHAILRRQEDFYPFLKDNREKIEKILTFRIPYYVGPLARGN
SRFAWMTRKSEETITPWNFEEVVDKGASAQSFIERMTNFDKNLPNEKVLPK
HSLLYEYFTVYNELTKVKYVTEGMRKPAFLSGEQKKAIVDLLFKTNRKVTV
KQLKEDYFKKIECFDSVEISGVEDRFNASLGTYHDLLKIIKDKDFLDNEEN
EDILEDIVLTLTLFEDREMIEERLKTYAHLFDDKVMKQLKRRRYTGWGRLS
RKLINGIRDKQSGKTILDFLKSDGFANRNFMQLIHDDSLTFKEDIQKAQVS
GQGDSLHEHIANLAGSPAIKKGILQTVKVVDELVKVMGRHKPENIVIEMAR
ENQTTQKGQKNSRERMKRIEEGIKELGSQILKEHPVENTQLQNEKLYLYYL
QNGRDMYVDQELDINRLSDYDVDHIVPQSFLKDDSIDNKVLTRSDKNRGKS
DNVPSEEVVKKMKNYWRQLLNAKLITQRKFDNLTKAERGGLSELDKAGFIK
RQLVETRQITKHVAQILDSRMNTKYDENDKLIREVKVITLKSKLVSDFRKD
FQFYKVREINNYHHAHDAYLNAVVGTALIKKYPKLESEFVYGDYKVYDVRK
MIAKSEQEIGKATAKYFFYSNIMNFFKTEITLANGEIRKRPLIETNGETGE
IVWDKGRDFATVRKVLSMPQVNIVKKTEVQTGGFSKESILPKRNSDKLIAR
KKDWDPKKYGGFVSPTVAYSVLVVAKVEKGKSKKLKSVKELLGITIMERSS
FEKNPIDFLEAKGYKEVKKDLIIKLPKYSLFELENGRKRMLASAGELQKGN
ELALPSKYVNFLYLASHYEKLKGSPEDNEQKQLFVEQHKHYLDEIIEQISE
FSKRVILADANLDKVLSAYNKHRDKPIREQAENIIHLFTLTNLGAPAAFKY
FDTTIDRKQYRSTKEVLDATLIHQSITGLYETRIDLSQLGGD.

[0280] In this sequence, residues V1135, Q1335, and R1336, which can be mutated from D1135, R1335, and T1336 to yield a SpVQR Cas9, are underlined and in bold.

[0281] The amino acid sequence of an exemplary PAM-binding SpVRER Cas9 is as follows:

MDKKYSIGLAIGTNSVGWAVITDEYKVPSKKFKVLGNTDRHSIKKNLIGAL
LFDSGETAEATRLKRTARRRYTRRKNRICYLQEIFSNEMAKVDDSFFHRLE
ESFLVEEDKKHERHPIFGNIVDEVAYHEKYPTIYHLRKKLVDSTDKADLRL
IYLALAHMIKFRGHFLIEGDLNPDNSDVDKLFIQLVQTYNQLFEENPINAS
GVDAKAILSARLSKSRRLENLIAQLPGEKKNGLFGNLIALSLGLTPNFKSN
FDLAEDAKLQLSKDTYDDDLDNLLAQIGDQYADLFLAAKNLSDAILLSDIL
RVNTEITKAPLSASMIKRYDEHHQDLTLLKALVRQQLPEKYKEIFFDQSKN
GYAGYIDGGASQEEFYKFIKPILEKMDGTEELLVKLNREDLLRKQRTFDNG
SIPHQIHLGELHAILRRQEDFYPFLKDNREKIEKILTFRIPYYVGPLARGN
SRFAWMTRKSEETITPWNFEEVVDKGASAQSFIERMTNFDKNLPNEKVLPK
HSLLYEYFTVYNELTKVKYVTEGMRKPAFLSGEQKKAIVDLLFKTNRKVTV
KQLKEDYFKKIECFDSVEISGVEDRFNASLGTYHDLLKIIKDKDFLDNEEN
EDILEDIVLTLTLFEDREMIEERLKTYAHLFDDKVMKQLKRRRYTGWGRLS
RKLINGIRDKQSGKTILDFLKSDGFANRNFMQLIHDDSLTFKEDIQKAQVS
GQGDSLHEHIANLAGSPAIKKGILQTVKVVDELVKVMGRHKPENIVIEMAR
ENQTTQKGQKNSRERMKRIEEGIKELGSQILKEHPVENTQLQNEKLYLYYL
QNGRDMYVDQELDINRLSDYDVDHIVPQSFLKDDSIDNKVLTRSDKNRGKS
DNVPSEEVVKKMKNYWRQLLNAKLITQRKFDNLTKAERGGLSELDKAGFIK
RQLVETRQITKHVAQILDSRMNTKYDENDKLIREVKVITLKSKLVSDFRKD
FQFYKVREINNYHHAHDAYLNAVVGTALIKKYPKLESEFVYGDYKVYDVRK
MIAKSEQEIGKATAKYFFYSNIMNFFKTEITLANGEIRKRPLIETNGETGE
IVWDKGRDFATVRKVLSMPQVNIVKKTEVQTGGFSKESILPKRNSDKLIAR
KKDWDPKKYGGFVSPTVAYSVLVVAKVEKGKSKKLKSVKELLGITIMERSS
FEKNPIDFLEAKGYKEVKKDLIIKLPKYSLFELENGRKRMLASARELQKGN
ELALPSKYVNFLYLASHYEKLKGSPEDNEQKQLFVEQHKHYLDEIIEQISE
FSKRVILADANLDKVLSAYNKHRDKPIREQAENIIHLFTLTNLGAPAAFKY
FDTTIDRKEYRSTKEVLDATLIHQSITGLYETRIDLSQLGGD.

[0282] In some embodiments, the Cas9 domain is a recombinant Cas9 domain. In some embodiments, the recombinant Cas9 domain is a SpyMacCas9 domain. In some embodiments, the SpyMacCas9 domain is a nuclease active SpyMacCas9, a nuclease inactive SpyMacCas9 (SpyMacCas9d), or a SpyMacCas9 nickase (SpyMacCas9n). In some embodiments, the SaCas9 domain, the SaCas9d domain, or the SaCas9n domain can bind to a nucleic acid sequence having a non-canonical PAM. In some embodiments, the SpyMacCas9 domain, the SpCas9d domain, or the SpCas9n domain can bind to a nucleic acid sequence having a NAA PAM sequence.

### Exemplary SpyMacCas9

MDKKYSIGLDIGTNSVGWAVITDDYKVPSKKFKVLGNTDRHSIKKNLIGAL
LFGSGETAEATRLKRTARRRYTRRKNRICYLQEIFSNEMAKVDDSFFHRLE
ESFLVEEDKKHERHPIFGNIVDEVAYHEKYPTIYHLRKKLADSTDKADLRL
IYLALAHMIKFRGHFLIEGDLNPDNSDVDKLFIQLVQIYNQLFEENPINAS
RVDAKAILSARLSKSRRLENLIAQLPGEKRNGLFGNLIALSLGLTPNFKSN
FDLAEDAKLQLSKDTYDDDLDNLLAQIGDQYADLFLAAKNLSDAILLSDIL
RVNSEITKAPLSASMIKRYDEHHQDLTLLKALVRQQLPEKYKEIFFDQSKN
GYAGYIDGGASQEEFYKFIKPILEKMDGTEELLVKLNREDLLRKQRTFDNG
SIPHQIHLGELHAILRRQEDFYPFLKDNREKIEKILTFRIPYYVGPLARGN
SRFAWMTRKSEETITPWNFEEVVDKGASAQSFIERMTNFDKNLPNEKVLPK
HSLLYEYFTVYNELTKVKYVTEGMRKPAFLSGEQKKAIVDLLFKTNRKVTV
KQLKEDYFKKIECFDSVEISGVEDRFNASLGAYHDLLKIIKDKDFLDNEEN
EDILEDIVLTLTLFEDRGMIEERLKTYAHLFDDKVMKQLKRRRYTGWGRLS
RKLINGIRDKQSGKTILDFLKSDGFANRNFMQLIHDDSLTFKEDIQKAQVS
GQGHSLHEQIANLAGSPAIKKGILQTVKIVDELVKVMGHKPENIVIEMARE
NQTTQKGQKNSRERMKRIEEGIKELGSQILKEHPVENTQLQNEKLYLYYLQ
NGRDMYVDQELDINRLSDYDVDHIVPQSFIKDDSIDNKVLTRSDKNRGKSD
NVPSEEVVKKMKNYWRQLLNAKLITQRKFDNLTKAERGGLSELDKAGFIKR
QLVETRQITKHVAQILDSRMNTKYDENDKLIREVKVITLKSKLVSDFRKDF
QFYKVREINNYHHAHDAYLNAVVGTALIKKYPKLESEFVYGDYKVYDVRKM
IAKSEQEIGKATAKYFFYSNIMNFFKTEITLANGEIRKRPLIETNGETGEI
VWDKGRDFATVRKVLSMPQVNIVKKTEIQTVGQNGGLFDDNPKSPLEVITS
KLVPLKKELNPKKYGGYQKPITAYPVLLITDTKQLIPISVMNKKQFEQNPV
KFLRDRGYQQVGKNDFIKLPKYTLVDIGDGIKRLWASSKEIHKGNQLVVSK
KSQILLYHAHHLDSDLSNDYLQNHNQQFDVLFNEIISFSKKCKLGKEHIQK
IENVYSNKKNSASIEELAESFIKLLGFTQLGATSPFNFLGVKLNQKQYKGK
KDYILPCTEGTLIRQSITGLYETRVDLSKIGED.

[0284] In some cases, a variant Cas9 protein harbors, H840A, P475A, W476A, N477A, D1125A, W1126A, and D1218A mutations such that the polypeptide has a reduced ability to cleave a target DNA or RNA. Such a Cas9 protein has a reduced ability to cleave a target DNA (e.g., a single stranded target DNA) but retains the ability to bind a target DNA (e.g., a single stranded target DNA). As another non-limiting example, in some cases, the variant Cas9 protein harbors D10A, H840A, P475A, W476A, N477A, D1125A, W1126A, and D1218A mutations such that the polypeptide has a reduced ability to cleave a target DNA. Such a Cas9 protein has a reduced ability to cleave a target DNA (e.g., a single stranded target DNA) but retains the ability to bind a target DNA (e.g., a single stranded target DNA). In some cases, when a variant Cas9 protein harbors W476A and W1126A mutations or when the variant Cas9 protein harbors P475A, W476A, N477A, D1125A, W1126A, and D1218A mutations, the variant Cas9 protein does not bind efficiently to a PAM sequence. Thus, in some such cases, when such a variant Cas9 protein is used in a method of binding, the method does not require a PAM sequence. In other words, in some cases, when such a variant Cas9 protein is used in a method of binding, the method can include a guide RNA, but the method can be performed in the absence of a PAM sequence (and the specificity of binding is therefore provided by the targeting segment of the guide RNA). Other residues can be mutated to achieve the above effects (i.e., inactivate one or the other nuclease portions). As non-limiting examples, residues D10, G12, G17, E762, H840, N854, N863, H982, H983, A984, D986, and/or A987 can be altered (i.e., substituted). Also, mutations other than alanine substitutions are suitable.

[0285] In some embodiments, a CRISPR protein-derived domain of a base editor can comprise all or a portion of a Cas9 protein with a canonical PAM sequence (NGG). In other embodiments, a Cas9-derived domain of a base editor can employ a non-canonical PAM sequence. Such sequences have been described in the art and would be apparent to the skilled artisan. For example, Cas9 domains that bind non-canonical PAM sequences have been described in Kleinstiver, B. P., et al., “Engineered CRISPR-Cas9 nucleases with altered PAM specificities” Nature 523, 481-485 (2015); and Kleinstiver, B. P., et al., “Broadening the targeting range of Staphylococcus aureus CRISPR-Cas9 by modifying PAM recognition” Nature Biotechnology 33, 1293-1298 (2015); the entire contents of each are hereby incorporated by reference.

### Fusion Proteins Comprising a Nuclear Localization Sequence (NLS)

[0286] In some embodiments, the fusion proteins provided herein further comprise one or more (e.g., 2, 3, 4, 5) nuclear targeting sequences, for example a nuclear localization sequence (NLS). In one embodiment, a bipartite NLS is used. In some embodiments, a NLS comprises an amino acid sequence that facilitates the importation of a protein, that comprises an NLS, into the cell nucleus (e.g., by nuclear transport). In some embodiments, any of the fusion proteins provided herein further comprise a nuclear localization sequence (NLS). In some embodiments, the NLS is fused to the N-terminus of the fusion protein. In some embodiments, the NLS is fused to the C-terminus of the fusion protein. In some embodiments, the NLS is fused to the N-terminus of the Cas9 domain. In some embodiments, the NLS is fused to the C-terminus of an nCas9 domain or a dCas9 domain. In some embodiments, the NLS is fused to the N-terminus of the deaminase. In some embodiments, the NLS is fused to the C-terminus of the deaminase. In some embodiments, the NLS is fused to the fusion protein via one or more linkers. In some embodiments, the NLS is fused to the fusion protein without a linker. In some embodiments, the NLS comprises an amino acid sequence of any one of the NLS sequences provided or referenced herein. Additional nuclear localization sequences are known in the art and would be apparent to the skilled artisan. For example, NLS sequences are described in Plank et al., PCT/EP2000/011690, the contents of which are incorporated herein by reference for their disclosure of exemplary nuclear localization sequences. In some embodiments, an NLS comprises the amino acid sequence PKKKRKVEGADKRTADGSEFESPKKKRKV, KRTADGSEFESPKKKRKV, KRPAATKKAGQAKKKK, KKTELQTTNAENKTKKL, KRGINDRNFWRGENGRKTR, RKSGKIAAIVVKRPRKPKKKRKV, or MDSLLMNRRKFLYQFKNVRWAKGRRETYLC. In some embodiments, the NLS is present in a linker or the NLS is flanked by linkers, for example, the linkers described herein. In some embodiments, the N-terminus or C-terminus NLS is a bipartite NLS. A bipartite NLS comprises two basic amino acid clusters, which are separated by a relatively short spacer sequence (hence bipartite—2 parts, while monopartite NLSs are not). The NLS of nucleoplasmin, KR[PAATKKAGQA]KKKK, is the prototype of the ubiquitous bipartite signal: two clusters of basic amino acids, separated by a spacer of about 10 amino acids. The sequence of an exemplary bipartite NLS follows: PKKKRKVEGADKRTADGSEFES PKKKRKV.

[0287] In some embodiments, the fusion proteins of the invention do not comprise a linker sequence. In some embodiments, linker sequences between one or more of the domains or proteins are present.

[0288] It should be appreciated that the fusion proteins of the present disclosure may comprise one or more additional features. For example, in some embodiments, the fusion protein may comprise inhibitors, cytoplasmic localization sequences, export sequences, such as nuclear export sequences, or other localization sequences, as well as sequence tags that are useful for solubilization, purification, or detection of the fusion proteins. Suitable protein tags provided herein include, but are not limited to, biotin carboxylase carrier protein (BCCP) tags, myc-tags, calmodulin-tags, FLAG-tags, hemagglutinin (HA)-tags, polyhistidine tags, also referred to as histidine tags or His-tags, maltose binding protein (MBP)-tags, nus-tags, glutathione-S-transferase (GST)-tags, green fluorescent protein (GFP)-tags, thioredoxin-tags, S-tags, Softags (e.g., Softag 1, Softag 3), strep-tags, biotin ligase tags, FlAsH tags, V5 tags, and SBP-tags. Additional suitable sequences will be apparent to those of skill in the art. In some embodiments, the fusion protein comprises one or more His tags.

[0289] A vector that encodes a CRISPR enzyme comprising one or more nuclear localization sequences (NLSs) can be used. For example, there can be or be about 1, 2, 3, 4, 5, 6, 7, 8, 9, 10 NLSs used. A CRISPR enzyme can comprise the NLSs at or near the ammo-terminus, about or more than about 1, 2, 3, 4, 5, 6, 7, 8, 9, 10 NLSs at or near the carboxy-terminus, or any combination of these (e.g., one or more NLS at the ammo-terminus and one or more NLS at the carboxy terminus). When more than one NLS is present, each can be selected independently of others, such that a single NLS can be present in more than one copy and/or in combination with one or more other NLSs present in one or more copies.

[0290] CRISPR enzymes used in the methods can comprise about 6 NLSs. An NLS is considered near the N- or C-terminus when the nearest amino acid to the NLS is within about 50 amino acids along a polypeptide chain from the N- or C-terminus, e.g., within 1, 2, 3, 4, 5, 10, 15, 20, 25, 30, 40, or 50 amino acids.

Cas9 Domains with Reduced Exclusivity

[0291] Typically, Cas9 proteins, such as Cas9 from S. pyogenes (spCas9), require a canonical NGG PAM sequence to bind a particular nucleic acid region, where the “N” in “NGG” is adenosine (A), thymidine (T), or cytosine (C), and the G is guanosine. This may limit the ability to edit desired bases within a genome. In some embodiments, the base editing fusion proteins provided herein may need to be placed at a precise location, for example a region comprising a target base that is upstream of the PAM. See e.g., Komor, A. C., et al., “Programmable editing of a target base in genomic DNA without double-stranded DNA cleavage” Nature 533, 420-424 (2016), the entire contents of which are hereby incorporated by reference. Accordingly, in some embodiments, any of the fusion proteins provided herein may contain a Cas9 domain that is capable of binding a nucleotide sequence that does not contain a canonical (e.g., NGG) PAM sequence. Cas9 domains that bind to non-canonical PAM sequences have been described in the art and would be apparent to the skilled artisan. For example, Cas9 domains that bind non-canonical PAM sequences have been described in Kleinstiver, B. P., et al., “Engineered CRISPR-Cas9 nucleases with altered PAM specificities” Nature 523, 481-485 (2015); and Kleinstiver, B. P., et al., “Broadening the targeting range of Staphylococcus aureus CRISPR-Cas9 by modifying PAM recognition” Nature Biotechnology 33, 1293-1298 (2015); Nishimasu, H., et al., “Engineered CRISPR-Cas9 nuclease with expanded targeting space” Science. 2018 Sep. 21; 361(6408):1259-1262, Chatterjee, P., et al., Minimal PAM specificity of a highly similar SpCas9 ortholog” Sci Adv. 2018 Oct. 24; 4(10):eaau0766. doi: 10.1126/sciadv.aau0766, the entire contents of each are hereby incorporated by reference.

### Nucleobase Editing Domain

[0292] Described herein are base editors comprising a fusion protein that includes a polynucleotide programmable nucleotide binding domain and a nucleobase editing domain (e.g., one or more deaminase domains). The base editor can be programmed to edit one or more bases in a target polynucleotide sequence by interacting with a guide polynucleotide capable of recognizing the target sequence. Once the target sequence has been recognized, the base editor is anchored on the polynucleotide where editing is to occur and the one or more deaminase domain components of the base editor can then edit a target base.

[0293] In some embodiments, the nucleobase editing domain includes one or more deaminase domains. As particularly described herein, the deaminase domain includes a cytosine deaminase or a cytidine deaminase and an adenine deaminase or an adenosine deaminase (e.g., a multi-effector base editor). In some embodiments, the terms “cytosine deaminase” and “cytidine deaminase” can be used interchangeably. In some embodiments, the terms “adenine deaminase” and “adenosine deaminase” can be used interchangeably. Details of nucleobase editing proteins are described in International PCT Application Nos. PCT/2017/045381 (WO2018/027078) and PCT/US2016/058344 (WO2017/070632), each of which is incorporated herein by reference for its entirety. Also see Komor, A. C., et al., “Programmable editing of a target base in genomic DNA without double-stranded DNA cleavage” Nature 533, 420-424 (2016); Gaudelli, N. M., et al., “Programmable base editing of A•T to G•C in genomic DNA without DNA cleavage” Nature 551, 464-471 (2017); and Komor, A. C., et al., “Improved base excision repair inhibition and bacteriophage Mu Gam protein yields C:G-to-T:A base editors with higher efficiency and product purity” Science Advances 3:eaao4774 (2017), the entire contents of which are hereby incorporated by reference.

### A to G Editing

[0294] In some embodiments, a base editor described herein can comprise a deaminase domain which includes an adenosine deaminase. Such an adenosine deaminase domain of a base editor can facilitate the editing of an adenine (A) nucleobase to a guanine (G) nucleobase by deaminating the A to form inosine (I), which exhibits base pairing properties of G. Adenosine deaminase is capable of deaminating (i.e., removing an amine group) adenine of a deoxyadenosine residue in deoxyribonucleic acid (DNA).

[0295] In some embodiments, the nucleobase editors provided herein can be made by fusing together one or more protein domains, thereby generating a fusion protein. In certain embodiments, the fusion proteins provided herein comprise one or more features that improve the base editing activity (e.g., efficiency, selectivity, and specificity) of the fusion proteins. For example, the fusion proteins provided herein can comprise a Cas9 domain that has reduced nuclease activity. In some embodiments, the fusion proteins provided herein can have a Cas9 domain that does not have nuclease activity (dCas9), or a Cas9 domain that cuts one strand of a duplexed DNA molecule, referred to as a Cas9 nickase (nCas9). Without wishing to be bound by any particular theory, the presence of the catalytic residue (e.g., H840) maintains the activity of the Cas9 to cleave the non-edited (e.g., non-deaminated) strand containing a T opposite the targeted A. Mutation of the catalytic residue (e.g., D10 to A10) of Cas9 prevents cleavage of the edited strand containing the targeted A residue. Such Cas9 variants are able to generate a single-strand DNA break (nick) at a specific location based on the gRNA-defined target sequence, leading to repair of the non-edited strand, ultimately resulting in a T to C change on the non-edited strand. In some embodiments, an A-to-G base editor further comprises an inhibitor of inosine base excision repair, for example, a uracil glycosylase inhibitor (UGI) domain or a catalytically inactive inosine specific nuclease. Without wishing to be bound by any particular theory, the UGI domain or catalytically inactive inosine specific nuclease can inhibit or prevent base excision repair of a deaminated adenosine residue (e.g., inosine), which can improve the activity or efficiency of the base editor.

[0296] A base editor comprising an adenosine deaminase can act on any polynucleotide, including DNA, RNA and DNA-RNA hybrids. In certain embodiments, a base editor comprising an adenosine deaminase can deaminate a target A of a polynucleotide comprising RNA. For example, the base editor can comprise an adenosine deaminase domain capable of deaminating a target A of an RNA polynucleotide and/or a DNA-RNA hybrid polynucleotide. In an embodiment, an adenosine deaminase incorporated into a base editor comprises all or a portion of adenosine deaminase acting on RNA (ADAR, e.g., ADAR1 or ADAR2). In another embodiment, an adenosine deaminase incorporated into a base editor comprises all or a portion of adenosine deaminase acting on tRNA (ADAT). A base editor comprising an adenosine deaminase domain can also be capable of deaminating an A nucleobase of a DNA polynucleotide. In an embodiment an adenosine deaminase domain of a base editor comprises all or a portion of an ADAT comprising one or more mutations which permit the ADAT to deaminate a target A in DNA. For example, the base editor can comprise all or a portion of an ADAT from Escherichia coli (EcTadA) comprising one or more of the following mutations: D108N, A106V, D147Y, E155V, L84F, H123Y, I157F, or a corresponding mutation in another adenosine deaminase.

[0297] The adenosine deaminase can be derived from any suitable organism (e.g., E. coli). In some embodiments, the adenine deaminase is a naturally-occurring adenosine deaminase that includes one or more mutations corresponding to any of the mutations provided herein (e.g., mutations in ecTadA). The corresponding residue in any homologous protein can be identified by e.g., sequence alignment and determination of homologous residues. The mutations in any naturally-occurring adenosine deaminase (e.g., having homology to ecTadA) that corresponds to any of the mutations described herein (e.g., any of the mutations identified in ecTadA) can be generated accordingly.

### TadA

[0298] In particular embodiments, the TadA is any one of the TadA described herein or in PCT/US2017/045381 (WO 2018/027078), which is incorporated herein by reference in its entirety. In some embodiments, the adenosine deaminase comprises an amino acid sequence that is at least 60%, at least 65%, at least 70%, at least 75%, at least 80%, at least 85%, at least 90%, at least 95%, at least 96%, at least 97%, at least 98%, at least 99%, or at least 99.5% identical to any one of the amino acid sequences set forth in any of the adenosine deaminases provided herein. It should be appreciated that adenosine deaminases provided herein may include one or more mutations (e.g., any of the mutations provided herein). The disclosure provides any deaminase domains with a certain percent identity plus any of the mutations or combinations thereof described herein. In some embodiments, the adenosine deaminase comprises an amino acid sequence that has 1, 2, 3, 4, 5, 6, 7, 8, 9, 10, 11, 12, 13, 14, 15, 16, 17, 18, 19, 20, 21, 22, 21, 24, 25, 26, 27, 28, 29, 30, 31, 32, 33, 34, 35, 36, 37, 38, 39, 40, 41, 42, 43, 44, 45, 46, 47, 48, 49, 50, or more mutations compared to a reference sequence, or any of the adenosine deaminases provided herein. In some embodiments, the adenosine deaminase comprises an amino acid sequence that has at least 5, at least 10, at least 15, at least 20, at least 25, at least 30, at least 35, at least 40, at least 45, at least 50, at least 60, at least 70, at least 80, at least 90, at least 100, at least 110, at least 120, at least 130, at least 140, at least 150, at least 160, or at least 170 identical contiguous amino acid residues as compared to any one of the amino acid sequences known in the art or described herein.

[0299] In some embodiments the TadA deaminase is a full-length E. coli TadA deaminase. For example, in certain embodiments, the adenosine deaminase comprises the amino acid sequence:

MRRAFITGVFFLSEVEFSHEYWMRHALTLAKRAWDEREVPVGAVLVHNNRV
IGEGWNRPIGRHDPTAHAEIMALRQGGLVMQNYRLIDATLYVTLEPCVMCA
GAMIHSRIGRVVFGARDAKTGAAGSLMDVLHHPGMNHRVEITEGILADECA
ALLSDFFRMRRQEIKAQKKAQSSTD.

[0300] It should be appreciated, however, that additional adenosine deaminases useful in the present application would be apparent to the skilled artisan and are within the scope of this disclosure. For example, the adenosine deaminase may be a homolog of adenosine deaminase acting on tRNA (ADAT). Without limitation, the amino acid sequences of exemplary AD AT homologs include the following:

Staphylococcus aureus TadA:
MGSHMTNDIYFMTLAIEEAKKAAQLGEVPIGAIITKDDEVIARAHNLRETL
QQPTAHAEHIAIERAAKVLGSWRLEGCTLYVTLEPCVMCAGTIVMSRIPRV
VYGADDPKGGCSGSLMNLLQQSNFNHRAIVDKGVLKEACSTLLTTFFKNLR
ANKKSTN
Bacillus subtilis TadA:
MTQDELYMKEAIKEAKKAEEKGEVPIGAVLVINGEIIARAHNLRETEQRSI
AHAEMLVIDEACKALGTWRLEGATLYVTLEPCPMCAGAVVLSRVEKVVFGA
FDPKGGCSGTLMNLLQEERFNHQAEVVSGVLEEECGGMLSAFFRELRKKKK
AARKNLSE
Salmonella typhimurium (S. typhimurium) TadA:
MPPAFITGVTSLSDVELDHEYWMRHALTLAKRAWDEREVPVGAVLVHNHRV
IGEGWNRPIGRHDPTAHAEIMALRQGGLVLQNYRLLDTTLYVTLEPCVMCA
GAMVHSRIGRVVFGARDAKTGAAGSLIDVLHHPGMNHRVEIIEGVLRDECA
TLLSDFFRMRRQEIKALKKADRAEGAGPAV
Shewanella putrefaciens (S. putrefaciens) TadA:
MDEYWMQVAMQMAEKAEAAGEVPVGAVLVKDGQQIATGYNLSISQHDPTAH
AEILCLRSAGKKLENYRLLDATLYITLEPCAMCAGAMVHSRIARVVYGARD
EKTGAAGTVVNLLQHPAFNHQVEVTSGVLAEACSAQLSRFFKRRRDEKKAL
KLAQRAQQGIE
Haemophilus influenzae F3031 (H. influenzae) TadA:
MDAAKVRSEFDEKMMRYALELADKAEALGEIPVGAVLVDDARNIIGEGWNL
SIVQSDPTAHAEIIALRNGAKNIQNYRLLNSTLYVTLEPCTMCAGAILHSR
IKRLVFGASDYKTGAIGSRFHFFDDYKMNHTLEITSGVLAEECSQKLSTFF
QKRREEKKIEKALLKSLSDK
Caulobacter vibrioides (C. vibrioides) TadA:
MRTDESEDQDHRMMRLALDAARAAAEAGETPVGAVILDPSTGEVIATAGNG
PIAAHDPTAHAEIAAMRAAAAKLGNYRLTDLTLVVTLEPCAMCAGAISHAR
IGRVVFGADDPKGGAVVHGPKFFAQPTCHWRPEVTGGVLADESADLLRGFF
RARRKAKI
Geobacter sulfurreducens (G. sulfurreducens) TadA:
MSSLKKTPIRDDAYWMGKAIREAAKAAARDEVPIGAVIVRDGAVIGRGHNL
REGSNDPSAHAEMIAIRQAARRSANWRLTGATLYVTLEPCLMCMGAIILAR
LERVVFGCYDPKGGAAGSLYDLSADPRLNHQVRLSPGVCQEECGTMLSDFF
RDLRRRKKAKATPALF IDERKVPPEP
An embodiment of E. coli TadA (ecTadA) includes
the following:
MSEVEFSHEYWMRHALTLAKRARDEREVPVGAVLVLNNRVIGEGWNRAIGL
HDPTAHAEIMALRQGGLVMQNYRLIDATLYVTFEPCVMCAGAMIHSRIGRV
VFGVRNAKTGAAGSLMDVLHYPGMNHRVEITEGILADECAALLCYFFRMPR
QVFNAQKKAQSSTD

[0301] In some embodiments, the adenosine deaminase is from a prokaryote. In some embodiments, the adenosine deaminase is from a bacterium. In some embodiments, the adenosine deaminase is from Escherichia coli, Staphylococcus aureus, Salmonella typhi, Shewanella putrefaciens, Haemophilus influenzae, Caulobacter crescentus, or Bacillus subtilis. In some embodiments, the adenosine deaminase is from E. coli.

[0302] In one embodiment, a fusion protein of the invention comprises a wild-type TadA linked to TadA7.10, which is linked to Cas9 nickase. In particular embodiments, the fusion proteins comprise a single TadA7.10 domain (e.g., provided as a monomer). In other embodiments, the ABE7.10 editor comprises TadA7.10 and TadA(wt), which are capable of forming heterodimers.

[0303] In some embodiments, the adenosine deaminase comprises an amino acid sequence that is at least 60%, at least 65%, at least 70%, at least 75%, at least 80%, at least 85%, at least 90%, at least 95%, at least 96%, at least 97%, at least 98%, at least 99%, or at least 99.5% identical to any one of the amino acid sequences set forth in any of the adenosine deaminases provided herein. It should be appreciated that adenosine deaminases provided herein may include one or more mutations (e.g., any of the mutations provided herein). The disclosure provides any deaminase domains with a certain percent identity plus any of the mutations or combinations thereof described herein. In some embodiments, the adenosine deaminase comprises an amino acid sequence that has 1, 2, 3, 4, 5, 6, 7, 8, 9, 10, 11, 12, 13, 14, 15, 16, 17, 18, 19, 20, 21, 22, 21, 24, 25, 26, 27, 28, 29, 30, 31, 32, 33, 34, 35, 36, 37, 38, 39, 40, 41, 42, 43, 44, 45, 46, 47, 48, 49, 50, or more mutations compared to a reference sequence, or any of the adenosine deaminases provided herein. In some embodiments, the adenosine deaminase comprises an amino acid sequence that has at least 5, at least 10, at least 15, at least 20, at least 25, at least 30, at least 35, at least 40, at least 45, at least 50, at least 60, at least 70, at least 80, at least 90, at least 100, at least 110, at least 120, at least 130, at least 140, at least 150, at least 160, or at least 170 identical contiguous amino acid residues as compared to any one of the amino acid sequences known in the art or described herein.

[0304] It should be appreciated that any of the mutations provided herein (e.g., based on the TadA reference sequence) can be introduced into other adenosine deaminases, such as E. coli TadA (ecTadA), S. aureus TadA (saTadA), or other adenosine deaminases (e.g., bacterial adenosine deaminases). It would be apparent to the skilled artisan that additional deaminases may similarly be aligned to identify homologous amino acid residues that can be mutated as provided herein. Thus, any of the mutations identified in the TadA reference sequence can be made in other adenosine deaminases (e.g., ecTada) that have homologous amino acid residues. It should also be appreciated that any of the mutations provided herein can be made individually or in any combination in the TadA reference sequence or another adenosine deaminase.

[0305] In some embodiments, the adenosine deaminase comprises a D108X mutation in the TadA reference sequence, or a corresponding mutation in another adenosine deaminase (e.g., ecTadA), where X indicates any amino acid other than the corresponding amino acid in the wild-type adenosine deaminase. In some embodiments, the adenosine deaminase comprises a D108G, D108N, D108V, D108A, or D108Y mutation, or a corresponding mutation in another adenosine deaminase.

[0306] In some embodiments, the adenosine deaminase comprises an A106X mutation in TadA reference sequence, or a corresponding mutation in another adenosine deaminase (e.g., ecTadA), where X indicates any amino acid other than the corresponding amino acid in the wild-type adenosine deaminase. In some embodiments, the adenosine deaminase comprises an A106V mutation in TadA reference sequence, or a corresponding mutation in another adenosine deaminase (e.g., wild type TadA or ecTadA).

[0307] In some embodiments, the adenosine deaminase comprises a E155X mutation in TadA reference sequence, or a corresponding mutation in another adenosine deaminase (e.g., ecTadA), where the presence of X indicates any amino acid other than the corresponding amino acid in the wild-type adenosine deaminase. In some embodiments, the adenosine deaminase comprises a E155D, E155G, or E155V mutation in TadA reference sequence, or a corresponding mutation in another adenosine deaminase (e.g., ecTadA).

[0308] In some embodiments, the adenosine deaminase comprises a D147X mutation in TadA reference sequence, or a corresponding mutation in another adenosine deaminase (e.g., ecTadA), where the presence of X indicates any amino acid other than the corresponding amino acid in the wild-type adenosine deaminase. In some embodiments, the adenosine deaminase comprises a D147Y, mutation in TadA reference sequence, or a corresponding mutation in another adenosine deaminase (e.g., ecTadA).

[0309] In some embodiments, the adenosine deaminase comprises an A106X, E155X, or D147X, mutation in the TadA reference sequence, or a corresponding mutation in another adenosine deaminase (e.g., ecTadA), where X indicates any amino acid other than the corresponding amino acid in the wild-type adenosine deaminase. In some embodiments, the adenosine deaminase comprises an E155D, E155G, or E155V mutation. In some embodiments, the adenosine deaminase comprises a D147Y.

[0310] For example, an adenosine deaminase can contain a D108N, a A106V, a E155V, and/or a D147Y mutation in TadA reference sequence, or a corresponding mutation in another adenosine deaminase (e.g., ecTadA). In some embodiments, an adenosine deaminase comprises the following group of mutations (groups of mutations are separated by a “;”) in TadA reference sequence, or corresponding mutations in another adenosine deaminase (e.g., ecTadA): D108N and A106V; D108N and E155V; D108N and D147Y; A106V and E155V; A106V and D147Y; E155V and D147Y; D108N, A106V, and E55V; D108N, A106V, and D147Y; D108N, E55V, and D147Y; A106V, E55V, and D 147Y; and D108N, A106V, E55V, and D147Y. It should be appreciated, however, that any combination of corresponding mutations provided herein can be made in an adenosine deaminase (e.g., ecTadA).

[0311] In some embodiments, the adenosine deaminase comprises one or more of a H8X, T17X, L18X, W23X, L34X, W45X, R51X, A56X, E59X, E85X, M94X, I95X, V102X, F104X, A106X, R107X, D108X, K110X, M118X, N127X, A138X, F149X, M151X, R153X, Q154X, I156X, and/or K157X mutation in TadA reference sequence, or one or more corresponding mutations in another adenosine deaminase (e.g., ecTadA), where the presence of X indicates any amino acid other than the corresponding amino acid in the wild-type adenosine deaminase. In some embodiments, the adenosine deaminase comprises one or more of H8Y, T17S, L18E, W23L, L34S, W45L, R51H, A56E, or A56S, E59G, E85K, or E85G, M94L, 1951, V102A, F104L, A106V, R107C, or R107H, or R107P, D108G, or D108N, or D108V, or D108A, or D108Y, K110I, M118K, N127S, A138V, F149Y, M151V, R153C, Q154L, I156D, and/or K157R mutation in TadA reference sequence, or one or more corresponding mutations in another adenosine deaminase (e.g., ecTadA).

[0312] In some embodiments, the adenosine deaminase comprises one or more of a H8X, D108X, and/or N127X mutation in TadA reference sequence, or one or more corresponding mutations in another adenosine deaminase (e.g., ecTadA), where X indicates the presence of any amino acid. In some embodiments, the adenosine deaminase comprises one or more of a H8Y, D108N, and/or N127S mutation in TadA reference sequence, or one or more corresponding mutations in another adenosine deaminase (e.g., ecTadA).

[0313] In some embodiments, the adenosine deaminase comprises one or more of H8X, R26X, M61X, L68X, M70X, A106X, D108X, A109X, N127X, D147X, R152X, Q154X, E155X, K161X, Q163X, and/or T166X mutation in TadA reference sequence, or one or more corresponding mutations in another adenosine deaminase (e.g., ecTadA), where X indicates the presence of any amino acid other than the corresponding amino acid in the wild-type adenosine deaminase. In some embodiments, the adenosine deaminase comprises one or more of H8Y, R26W, M61I, L68Q, M70V, A106T, D108N, A109T, N127S, D147Y, R152C, Q154H or Q154R, E155G or E155V or E155D, K161Q, Q163H, and/or T166P mutation in TadA reference sequence, or one or more corresponding mutations in another adenosine deaminase (e.g., ecTadA).

[0314] In some embodiments, the adenosine deaminase comprises one, two, three, four, five, or six mutations selected from the group consisting of H8X, D108X, N127X, D147X, R152X, and Q154X in TadA reference sequence, or a corresponding mutation or mutations in another adenosine deaminase (e.g., ecTadA), where X indicates the presence of any amino acid other than the corresponding amino acid in the wild-type adenosine deaminase. In some embodiments, the adenosine deaminase comprises one, two, three, four, five, six, seven, or eight mutations selected from the group consisting of H8X, M61X, M70X, D108X, N127X, Q154X, E155X, and Q163X in TadA reference sequence, or a corresponding mutation or mutations in another adenosine deaminase (e.g., ecTadA), where X indicates the presence of any amino acid other than the corresponding amino acid in the wild-type adenosine deaminase. In some embodiments, the adenosine deaminase comprises one, two, three, four, or five, mutations selected from the group consisting of H8X, D108X, N127X, E155X, and T166X in TadA reference sequence, or a corresponding mutation or mutations in another adenosine deaminase (e.g., ecTadA), where X indicates the presence of any amino acid other than the corresponding amino acid in the wild-type adenosine deaminase.

[0315] In some embodiments, the adenosine deaminase comprises one, two, three, four, five, or six mutations selected from the group consisting of H8X, A106X, D108X, mutation or mutations in another adenosine deaminase, where X indicates the presence of any amino acid other than the corresponding amino acid in the wild-type adenosine deaminase. In some embodiments, the adenosine deaminase comprises one, two, three, four, five, six, seven, or eight mutations selected from the group consisting of H8X, R126X, L68X, D108X, N127X, D147X, and E155X, or a corresponding mutation or mutations in another adenosine deaminase, where X indicates the presence of any amino acid other than the corresponding amino acid in the wild-type adenosine deaminase. In some embodiments, the adenosine deaminase comprises one, two, three, four, or five, mutations selected from the group consisting of H8X, D108X, A109X, N127X, and E155X in TadA reference sequence, or a corresponding mutation or mutations in another adenosine deaminase (e.g., ecTadA), where X indicates the presence of any amino acid other than the corresponding amino acid in the wild-type adenosine deaminase.

[0316] In some embodiments, the adenosine deaminase comprises one, two, three, four, five, or six mutations selected from the group consisting of H8Y, D108N, N127S, D147Y, R152C, and Q154H in TadA reference sequence, or a corresponding mutation or mutations in another adenosine deaminase (e.g., ecTadA). In some embodiments, the adenosine deaminase comprises one, two, three, four, five, six, seven, or eight mutations selected from the group consisting of H8Y, M61I, M70V, D108N, N127S, Q154R, E155G and Q163H in TadA reference sequence, or a corresponding mutation or mutations in another adenosine deaminase (e.g., ecTadA). In some embodiments, the adenosine deaminase comprises one, two, three, four, or five, mutations selected from the group consisting of H8Y, D108N, N127S, E155V, and T166P in TadA reference sequence, or a corresponding mutation or mutations in another adenosine deaminase (e.g., ecTadA). In some embodiments, the adenosine deaminase comprises one, two, three, four, five, or six mutations selected from the group consisting of H8Y, A106T, D108N, N127S, E155D, and K161Q in TadA reference sequence, or a corresponding mutation or mutations in another adenosine deaminase (e.g., ecTadA). In some embodiments, the adenosine deaminase comprises one, two, three, four, five, six, seven, or eight mutations selected from the group consisting of H8Y, R126W, L68Q, D108N, N127S, D147Y, and E155V in TadA reference sequence, or a corresponding mutation or mutations in another adenosine deaminase (e.g., ecTadA). In some embodiments, the adenosine deaminase comprises one, two, three, four, or five, mutations selected from the group consisting of H8Y, D108N, A109T, N127S, and E155G in TadA reference sequence, or a corresponding mutation or mutations in another adenosine deaminase (e.g., ecTadA).

[0317] Any of the mutations provided herein and any additional mutations (e.g., based on the ecTadA amino acid sequence) can be introduced into any other adenosine deaminases. Any of the mutations provided herein can be made individually or in any combination in TadA reference sequence or another adenosine deaminase (e.g., ecTadA).

[0318] Details of A to G nucleobase editing proteins are described in International PCT Application No. PCT/2017/045381 (WO2018/027078) and Gaudelli, N. M., et al., “Programmable base editing of A•T to G•C in genomic DNA without DNA cleavage” Nature, 551, 464-471 (2017), the entire contents of which are hereby incorporated by reference.

[0319] In some embodiments, the adenosine deaminase comprises one or more corresponding mutations in another adenosine deaminase (e.g., ecTadA). In some embodiments, the adenosine deaminase comprises a D108N, D108G, or D108V mutation in TadA reference sequence, or corresponding mutations in another adenosine deaminase (e.g., ecTadA). In some embodiments, the adenosine deaminase comprises a A106V and D108N mutation in TadA reference sequence, or corresponding mutations in another adenosine deaminase (e.g., ecTadA). In some embodiments, the adenosine deaminase comprises R107C and D108N mutations in TadA reference sequence, or corresponding mutations in another adenosine deaminase (e.g., ecTadA). In some embodiments, the adenosine deaminase comprises a H8Y, D108N, N127S, D147Y, and Q154H mutation in TadA reference sequence, or corresponding mutations in another adenosine deaminase (e.g., ecTadA). In some embodiments, the adenosine deaminase comprises a H8Y, R24W, D108N, N127S, D147Y, and E155V mutation in TadA reference sequence, or corresponding mutations in another adenosine deaminase (e.g., ecTadA). In some embodiments, the adenosine deaminase comprises a D108N, D147Y, and E155V mutation in TadA reference sequence, or corresponding mutations in another adenosine deaminase (e.g., ecTadA). In some embodiments, the adenosine deaminase comprises a H8Y, D108N, and N127S mutation in TadA reference sequence, or corresponding mutations in another adenosine deaminase (e.g., ecTadA). In some embodiments, the adenosine deaminase comprises a A106V, D108N, D147Y and E155V mutation in TadA reference sequence, or corresponding mutations in another adenosine deaminase (e.g., ecTadA).

[0320] In some embodiments, the adenosine deaminase comprises one or more of a S2X, H8X, I49X, L84X, H123X, N127X, I156X and/or K160X mutation in TadA reference sequence, or one or more corresponding mutations in another adenosine deaminase, where the presence of X indicates any amino acid other than the corresponding amino acid in the wild-type adenosine deaminase. In some embodiments, the adenosine deaminase comprises one or more of S2A, H8Y, I49F, L84F, H123Y, N127S, I156F and/or K160S mutation in TadA reference sequence, or one or more corresponding mutations in another adenosine deaminase (e.g., ecTadA).

[0321] In some embodiments, the adenosine deaminase comprises an L84X mutation adenosine deaminase, where X indicates any amino acid other than the corresponding amino acid in the wild-type adenosine deaminase. In some embodiments, the adenosine deaminase comprises an L84F mutation in TadA reference sequence, or a corresponding mutation in another adenosine deaminase (e.g., ecTadA).

[0322] In some embodiments, the adenosine deaminase comprises an H123X mutation in TadA reference sequence, or a corresponding mutation in another adenosine deaminase (e.g., ecTadA), where X indicates any amino acid other than the corresponding amino acid in the wild-type adenosine deaminase. In some embodiments, the adenosine deaminase comprises an H123Y mutation in TadA reference sequence, or a corresponding mutation in another adenosine deaminase (e.g., ecTadA).

[0323] In some embodiments, the adenosine deaminase comprises an I157X mutation in TadA reference sequence, or a corresponding mutation in another adenosine deaminase (e.g., ecTadA), where X indicates any amino acid other than the corresponding amino acid in the wild-type adenosine deaminase. In some embodiments, the adenosine deaminase comprises an I157F mutation in TadA reference sequence, or a corresponding mutation in another adenosine deaminase (e.g., ecTadA).

[0324] In some embodiments, the adenosine deaminase comprises one, two, three, four, five, six, or seven mutations selected from the group consisting of L84X, A106X, D108X, H123X, D147X, E155X, and I156X in TadA reference sequence, or a corresponding mutation or mutations in another adenosine deaminase (e.g., ecTadA), where X indicates the presence of any amino acid other than the corresponding amino acid in the wild-type adenosine deaminase. In some embodiments, the adenosine deaminase comprises one, two, three, four, five, or six mutations selected from the group consisting of S2X, I49X, A106X, D108X, D147X, and E155X in TadA reference sequence, or a corresponding mutation or mutations in another adenosine deaminase (e.g., ecTadA), where X indicates the presence of any amino acid other than the corresponding amino acid in the wild-type adenosine deaminase. In some embodiments, the adenosine deaminase comprises one, two, three, four, or five, mutations selected from the group consisting of H8X, A106X, D108X, N127X, and K160X in TadA reference sequence, or a corresponding mutation or mutations in another adenosine deaminase (e.g., ecTadA), where X indicates the presence of any amino acid other than the corresponding amino acid in the wild-type adenosine deaminase.

[0325] In some embodiments, the adenosine deaminase comprises one, two, three, four, five, six, or seven mutations selected from the group consisting of L84F, A106V, D108N, H123Y, D147Y, E155V, and I156F in TadA reference sequence, or a corresponding mutation or mutations in another adenosine deaminase (e.g., ecTadA). In some embodiments, the adenosine deaminase comprises one, two, three, four, five, or six mutations selected from the group consisting of S2A, I49F, A106V, D108N, D147Y, and E155V in TadA reference sequence.

[0326] In some embodiments, the adenosine deaminase comprises one, two, three, four, or five, mutations selected from the group consisting of H8Y, A106T, D108N, N127S, and K160S in TadA reference sequence, or a corresponding mutation or mutations in another adenosine deaminase (e.g., ecTadA).

[0327] In some embodiments, the adenosine deaminase comprises one or more of a E25X, R26X, R107X, A142X, and/or A143X mutation in TadA reference sequence, or one or more corresponding mutations in another adenosine deaminase (e.g., ecTadA), where the presence of X indicates any amino acid other than the corresponding amino acid in the wild-type adenosine deaminase. In some embodiments, the adenosine deaminase comprises one or more of E25M, E25D, E25A, E25R, E25V, E25S, E25Y, R26G, R26N, R26Q, R26C, R26L, R26K, R107P, R07K, R107A, R107N, R107W, R107H, R107S, A142N, A142D, A142G, A143D, A143G, A143E, A143L, A143W, A143M, A143S, A143Q and/or A143R mutation in TadA reference sequence, or one or more corresponding mutations in another adenosine deaminase (e.g., ecTadA). In some embodiments, the adenosine deaminase comprises one or more of the mutations described herein corresponding to TadA reference sequence, or one or more corresponding mutations in another adenosine deaminase (e.g., ecTadA).

[0328] In some embodiments, the adenosine deaminase comprises an E25X mutation in TadA reference sequence, or a corresponding mutation in another adenosine deaminase (e.g., ecTadA), where X indicates any amino acid other than the corresponding amino acid in the wild-type adenosine deaminase. In some embodiments, the adenosine deaminase comprises an E25M, E25D, E25A, E25R, E25V, E25S, or E25Y mutation in TadA reference sequence, or a corresponding mutation in another adenosine deaminase (e.g., ecTadA).

[0329] In some embodiments, the adenosine deaminase comprises an R26X mutation in TadA reference sequence, or a corresponding mutation in another adenosine deaminase (e.g., ecTadA), where X indicates any amino acid other than the corresponding amino acid in the wild-type adenosine deaminase. In some embodiments, the adenosine deaminase comprises R26G, R26N, R26Q, R26C, R26L, or R26K mutation in TadA reference sequence, or a corresponding mutation in another adenosine deaminase (e.g., ecTadA).

[0330] In some embodiments, the adenosine deaminase comprises an R107X mutation in TadA reference sequence, or a corresponding mutation in another adenosine deaminase (e.g., ecTadA), where X indicates any amino acid other than the corresponding amino acid in the wild-type adenosine deaminase. In some embodiments, the adenosine deaminase comprises an R107P, R07K, R107A, R107N, R107W, R107H, or R107S mutation in TadA reference sequence, or a corresponding mutation in another adenosine deaminase (e.g., ecTadA).

[0331] In some embodiments, the adenosine deaminase comprises an A142X mutation in TadA reference sequence, or a corresponding mutation in another adenosine deaminase (e.g., ecTadA), where X indicates any amino acid other than the corresponding amino acid in the wild-type adenosine deaminase. In some embodiments, the adenosine deaminase comprises an A142N, A142D, A142G, mutation in TadA reference sequence, or a corresponding mutation in another adenosine deaminase (e.g., ecTadA).

[0332] In some embodiments, the adenosine deaminase comprises an A143X mutation in TadA reference sequence, or a corresponding mutation in another adenosine deaminase (e.g., ecTadA), where X indicates any amino acid other than the corresponding amino acid in the wild-type adenosine deaminase. In some embodiments, the adenosine deaminase comprises an A143D, A143G, A143E, A143L, A143W, A143M, A143S, A143Q and/or A143R mutation in TadA reference sequence, or a corresponding mutation in another adenosine deaminase (e.g., ecTadA).

[0333] In some embodiments, the adenosine deaminase comprises one or more of a H36X, N37X, P48X, I49X, R51X, M70X, N72X, D77X, E134X, S 146X, Q154X, K157X, and/or K161X mutation in TadA reference sequence, or one or more corresponding mutations in another adenosine deaminase (e.g., ecTadA), where the presence of X indicates any amino acid other than the corresponding amino acid in the wild-type adenosine deaminase. In some embodiments, the adenosine deaminase comprises one or more of H36L, N37T, N37S, P48T, P48L, I49V, R51H, R51L, M70L, N72S, D77G, E134G, S146R, S146C, Q154H, K157N, and/or K161T mutation in TadA reference sequence, or one or more corresponding mutations in another adenosine deaminase (e.g., ecTadA).

[0334] In some embodiments, the adenosine deaminase comprises an H36X mutation in TadA reference sequence, or a corresponding mutation in another adenosine deaminase (e.g., ecTadA), where X indicates any amino acid other than the corresponding amino acid in the wild-type adenosine deaminase. In some embodiments, the adenosine deaminase comprises an H36L mutation in TadA reference sequence, or a corresponding mutation in another adenosine deaminase (e.g., ecTadA).

[0335] In some embodiments, the adenosine deaminase comprises an N37X mutation in TadA reference sequence, or a corresponding mutation in another adenosine deaminase (e.g., ecTadA), where X indicates any amino acid other than the corresponding amino acid in the wild-type adenosine deaminase. In some embodiments, the adenosine deaminase comprises an N37T, or N37S mutation in TadA reference sequence, or a corresponding mutation in another adenosine deaminase (e.g., ecTadA).

[0336] In some embodiments, the adenosine deaminase comprises an P48X mutation in TadA reference sequence, or a corresponding mutation in another adenosine deaminase (e.g., ecTadA), where X indicates any amino acid other than the corresponding amino acid in the wild-type adenosine deaminase. In some embodiments, the adenosine deaminase comprises an P48T, or P48L mutation in TadA reference sequence, or a corresponding mutation in another adenosine deaminase (e.g., ecTadA).

[0337] In some embodiments, the adenosine deaminase comprises an R51X mutation in TadA reference sequence, or a corresponding mutation in another adenosine deaminase, where X indicates any amino acid other than the corresponding amino acid in the wild-type adenosine deaminase. In some embodiments, the adenosine deaminase comprises an R51H, or R51L mutation in TadA reference sequence, or a corresponding mutation in another adenosine deaminase (e.g., ecTadA).

[0338] In some embodiments, the adenosine deaminase comprises an S146X mutation in TadA reference sequence, or a corresponding mutation in another adenosine deaminase (e.g., ecTadA), where X indicates any amino acid other than the corresponding amino acid in the wild-type adenosine deaminase. In some embodiments, the adenosine deaminase comprises an S146R, or S146C mutation in TadA reference sequence, or a corresponding mutation in another adenosine deaminase (e.g., ecTadA).

[0339] In some embodiments, the adenosine deaminase comprises an K157X mutation in TadA reference sequence, or a corresponding mutation in another adenosine deaminase (e.g., ecTadA), where X indicates any amino acid other than the corresponding amino acid in the wild-type adenosine deaminase. In some embodiments, the adenosine deaminase comprises a K157N mutation in TadA reference sequence, or a corresponding mutation in another adenosine deaminase (e.g., ecTadA).

[0340] In some embodiments, the adenosine deaminase comprises an P48X mutation in TadA reference sequence, or a corresponding mutation in another adenosine deaminase (e.g., ecTadA), where X indicates any amino acid other than the corresponding amino acid in the wild-type adenosine deaminase. In some embodiments, the adenosine deaminase comprises a P48S, P48T, or P48A mutation in TadA reference sequence, or a corresponding mutation in another adenosine deaminase (e.g., ecTadA).

[0341] In some embodiments, the adenosine deaminase comprises an A142X mutation in TadA reference sequence, or a corresponding mutation in another adenosine deaminase (e.g., ecTadA), where X indicates any amino acid other than the corresponding amino acid in the wild-type adenosine deaminase. In some embodiments, the adenosine deaminase comprises a A142N mutation in TadA reference sequence, or a corresponding mutation in another adenosine deaminase (e.g., ecTadA).

[0342] In some embodiments, the adenosine deaminase comprises an W23X mutation in TadA reference sequence, or a corresponding mutation in another adenosine deaminase (e.g., ecTadA), where X indicates any amino acid other than the corresponding amino acid in the wild-type adenosine deaminase. In some embodiments, the adenosine deaminase comprises a W23R, or W23L mutation in TadA reference sequence, or a corresponding mutation in another adenosine deaminase (e.g., ecTadA).

[0343] In some embodiments, the adenosine deaminase comprises an R152X mutation in TadA reference sequence, or a corresponding mutation in another adenosine deaminase (e.g., ecTadA), where X indicates any amino acid other than the corresponding amino acid in the wild-type adenosine deaminase. In some embodiments, the adenosine deaminase comprises a R152P, or R52H mutation in TadA reference sequence, or a corresponding mutation in another adenosine deaminase (e.g., ecTadA).

[0344] In one embodiment, the adenosine deaminase may comprise the mutations H36L, R51L, L84F, A106V, D108N, H123Y, S146C, D147Y, E155V, I156F, and K157N. In some embodiments, the adenosine deaminase comprises the following combination of mutations relative to TadA reference sequence, where each mutation of a combination is separated by a “_” and each combination of mutations is between parentheses:

### (A106V_D108N),

### (R107C_D108N),

### (H8Y_D108N_N127S_D147Y_Q154H),

### (H8Y_R24W_D108N_N127S_D147Y_E155V),

### (D108N_D147Y_E155V),

### (H8Y_D108N_N127S),

### (H8Y_D108N_N127S_D147Y_Q154H),

### (A106V_D108N_D147Y_E155V),

### (D108Q_D147Y_E155V),

### (D108M_D147Y_E155V),

### (D108L_D147Y_E155V),

### (D108K_D147Y_E155V),

### (D108I_D147Y_E155V),

### (D108F_D147Y_E155V),

### (A106V_D108N_D147Y),

### (A106V_D108M_D147Y_E155V),

### (E59A_A106V_D108N_D147Y_E155V),

[0345] (E59A cat dead_A106V_D108N_D147Y_E155V),

### (L84F_A106V_D108N_H123Y_D147Y_E155V_I156Y),

### (L84F_A106V_D108N_H123Y_D147Y_E155V_I156F),

### (D103A_D104N),

### (G22P_D103A_D104N),

### (G22P_D103A_D104N_S138 A),

### (D103A_D104N_S138A),

### (R26G_L84F_A106V_R107H_D108N_H123Y_A142N_A143D_D147Y_E155V_I156F),

### (E25G_R26G_L84F_A106V_R107H_D108N_H123Y_A142N_A143D_D147Y_E155V_I156F),

### (E25D_R26G_L84F_A106V_R107K_D108N_H123Y_A142N_A143G D147Y_E155V_I156F),

### (R26Q_L84F_A106V_D108N_H123Y_A142N_D147Y_E155V_I156F),

### (E25M_R26G_L84F_A106V_R107P_D108N_H123Y_A142N_A143D_D147Y_E155V_I156F),

### (R26C_L84F_A106V_R107H_D108N_H123Y_A142N_D147Y_E155V_I156F),

### (L84F_A106V_D108N_H123Y_A142N_A143L_D147Y_E155V_I156F),

### (R26G_L84F_A106V_D108N_H123Y_A142N_D147Y_E155V_I156F),

### (E25A_R26G_L84F_A106V_R107N_D108N_H123Y_A142N_A143E_D147Y_E155V_I156F),

### (R26G_L84F_A106V_R107H_D108N_H123Y_A142N_A143D_D147Y_E155V_I156F),

### (A106V_D108N_A142N_D147Y_E155V),

### (R26G_A106V_D108N_A142N_D147Y_E155V),

### (E25D_R26G_A106V_R107K_D108N_A142N_A143G D147Y_E155V),

### (R26G_A106V_D108N_R107H_A142N_A143D_D147Y_E155V),

### (E25D_R26G_A106V_D108N_A142N_D147Y_E155V),

### (A106V_R107K_D108N_A142N_D147Y_E155V),

### (A106V_D108N_A142N_A143G D147Y_E155V),

### (A106V_D108N_A142N_A143L_D147Y_E155V),

### (H36L_R51L_L84F_A106V_D108N_H123Y_S146C_D147Y_E155V_I156F_K157N),

### (N37T_P48T_M70L_L84F_A106V_D108N_H123Y_D147Y_I49V_E155V_I156F),

### (N37S_L84F_A106V_D108N_H123Y_D147Y_E155V_I156F_K161T),

### (H36L_L84F_A106V_D108N_H123Y_D147Y_Q154H_E155V_I156F),

### (N72S_L84F_A106V_D108N_H123Y_S146R_D147Y_E155V_I156F),

### (H36L_P48L_L84F_A106V_D108N_H123Y_E134G D147Y_E155V_I156F),

### (H36L_L84F_A106V_D108N_H123Y_D147Y_E155V_I156F_K157N),

### (H36L_L84F_A106V_D108N_H123Y_S146C_D147Y_E155V_I156F),

### (L84F_A106V_D108N_H123Y_S146R_D147Y_E155V_I156F_K161T),

### (N37S_R51H_D77G_L84F_A106V_D108N_H123Y_D147Y_E155V_I156F),

### (R51L_L84F_A106V_D108N_H123Y_D147Y_E155V_I156F_K157N),

### (D24G_Q71R_L84F_H96L_A106V_D108N_H123Y_D147Y_E155V_I156F_K160E),

### (H36L_G67V_L84F_A106V_D108N_H123Y_S146T_D147Y_E155V_I156F),

### (Q71L_L84F_A106V_D108N_H123Y_L137M_A143E_D147Y_E155V_I156F),

### (E25G_L84F_A106V_D108N_H123Y_D147Y_E155V_I156F_Q159L),

### (L84F_A91T_F104I_A106V_D108N_H123Y_D147Y_E155V_I156F),

### (N72D_L84F_A106V_D108N_H123Y_G125A_D147Y_E155V_I156F),

### (P48S_L84F_S97C_A106V_D108N_H123Y_D147Y_E155V_I156F),

### (W23G_L84F_A106V_D108N_H123Y_D147Y_E155V_I156F),

### (D24G P48L Q71R_L84F_A106V_D108N_H123Y_D147Y_E155V_I156F_Q159L),

### (L84F_A106V_D108N_H123Y_A142N_D147Y_E155V_I156F),

### (H36L_R51L_L84F_A106V_D108N_H123Y_A142N_S146C_D147Y_E155V_I156F

### K157N), (N37S_L84F_A106V_D108N_H123Y_A142N_D147Y_E155V_I156F_K161T),

### (L84F_A106V_D108N_D147Y_E155V_I156F),

### (R51L_L84F_A106V_D108N_H123Y_S146C_D147Y_E155V_I156F_K157N_K161T),

### (L84F_A106V_D108N_H123Y_S146C_D147Y_E155V_I156F_K161T),

### (L84F_A106V_D108N_H123Y_S146C_D147Y_E155V_I156F_K157N_K160E_K161T),

### (L84F_A106V_D108N_H123Y_S146C_D147Y_E155V_I156F_K157N_K160E),

### (R74Q_L84F_A106V_D108N_H123Y_D147Y_E155V_I156F),

### (R74A_L84F_A106V_D108N_H123Y_D147Y_E155V_I156F),

### (L84F_A106V_D108N_H123Y_D147Y_E155V_I156F),

### (R74Q_L84F_A106V_D108N_H123Y_D147Y_E155V_I156F),

### (L84F_R98Q_A106V_D108N_H123Y_D147Y_E155V_I156F),

### (L84F_A106V_D108N_H123Y_R129Q_D147Y_E155V_I156F),

### (P48S_L84F_A106V_D108N_H123Y_A142N_D147Y_E155V_I156F),

### (P48S_A142N),

### (P48T_I49V_L84F_A106V_D108N_H123Y_A142N_D147Y_E155V_I156F_L157N),

### (P48T_I49V_A142N),

### (H36L_P48S_R51L_L84F_A106V_D108N_H123Y_S146C_D147Y_E155V_I156F_K157N),

### (H36L_P48S_R51L_L84F_A106V_D108N_H123Y_S146C_A142N_D147Y_E155V_I156F

### (H36L_P48T_I49V_R51L_L84F_A106V_D108N_H123Y_S146C_D147Y_E155V_I156F_K157N),

### (H36L_P48T_I49V_R51L_L84F_A106V_D108N_H123Y_A142N_S146C_D147Y_E155V_I156F_K157N),

### (H36L_P48A_R51L_L84F_A106V_D108N_H123Y_S146C_D147Y_E155V_I156F_K157N),

### (H36L_P48A_R51L_L84F_A106V_D108N_H123Y_A142N_S146C_D147Y_E155V_I156F_K157N),

### (H36L_P48A_R51L_L84F_A106V_D108N_H123Y_S146C_A142N_D147Y_E155V_I156F_K157N),

### (W23L_H36L_P48A_R51L_L84F_A106V_D108N_H123Y_S146C_D147Y_E155V_I156F_K157N),

### (W23R_H36L_P48A_R51L_L84F_A106V_D108N_H123Y_S146C_D147Y_E155V_I156F_K157N),

### (W23L_H36L_P48A_R51L_L84F_A106V_D108N_H123Y_S146R_D147Y_E155V_I156F_K161T),

### (H36L_P48A_R51L_L84F_A106V_D108N_H123Y_S146C_D147Y_R152H_E155V_I156F_K157N),

### (H36L_P48A_R51L_L84F_A106V_D108N_H123Y_S146C_D147Y_R152P_E155V_I156F_K157N),

### (W23L_H36L_P48A_R51L_L84F_A106V_D108N_H123Y_S146C_D147Y_R152P_E155V_I156F_K157N),

### (W23L_H36L_P48A_R51L_L84F_A106V_D108N_H123Y_A142A_S146C_D147Y_E155V

### I156F_K157N),

### (W23L_H36L_P48A_R51L_L84F_A106V_D108N_H123Y_A142A_S146C_D147Y_R152P_E155V_I156F_K157N),

### (W23L_H36L_P48A_R51L_L84F_A106V_D108N_H123Y_S146R_D147Y_E155V_I156F_K161T),

### (W23R_H36L_P48A_R51L_L84F_A106V_D108N_H123Y_S146C_D147Y_R152P_E155V_I156F_K157N),

### (H36L_P48A_R51L_L84F_A106V_D108N_H123Y_A142N_S146C_D147Y_R152P_E155V

### I156F_K157N).

[0346] In certain embodiments, the fusion proteins provided herein comprise one or more features that improve the base editing activity of the fusion proteins. For example, any of the fusion proteins provided herein may comprise a Cas9 domain that has reduced nuclease activity. In some embodiments, any of the fusion proteins provided herein may have a Cas9 domain that does not have nuclease activity (dCas9), or a Cas9 domain that cuts one strand of a duplexed DNA molecule, referred to as a Cas9 nickase (nCas9).

### Adenosine Deaminases

[0347] The fusion proteins of the invention comprise one or more adenosine deaminases. In some embodiments, the adenosine deaminases provided herein are capable of deaminating adenine. In some embodiments, the adenosine deaminases provided herein are capable of deaminating adenine in a deoxyadenosine residue of DNA. The adenosine deaminase may be derived from any suitable organism (e.g., E. coli). In some embodiments, the adenine deaminase is a naturally-occurring adenosine deaminase that includes one or more mutations corresponding to any of the mutations provided herein (e.g., mutations in ecTadA). One of skill in the art will be able to identify the corresponding residue in any homologous protein, e.g., by sequence alignment and determination of homologous residues. Accordingly, one of skill in the art would be able to generate mutations in any naturally-occurring adenosine deaminase (e.g., having homology to ecTadA) that corresponds to any of the mutations described herein, e.g., any of the mutations identified in ecTadA. In some embodiments, the adenosine deaminase is from a prokaryote. In some embodiments, the adenosine deaminase is from a bacterium. In some embodiments, the adenosine deaminase is from Escherichia coli, Staphylococcus aureus, Salmonella typhi, Shewanella putrefaciens, Haemophilus influenzae, Caulobacter crescentus, or Bacillus subtilis. In some embodiments, the adenosine deaminase is from E. coli.

[0348] In some embodiments, the adenosine deaminases provided herein are capable of deaminating adenine. In some embodiments, the adenosine deaminases provided herein are capable of deaminating adenine in a deoxyadenosine residue of DNA. In some embodiments, the adenine deaminase is a naturally-occurring adenosine deaminase that includes one or more mutations corresponding to any of the mutations provided herein (e.g., mutations in ecTadA). One of skill in the art will be able to identify the corresponding residue in any homologous protein, e.g., by sequence alignment and determination of homologous residues. Accordingly, one of skill in the art would be able to generate mutations in any naturally-occurring adenosine deaminase (e.g., having homology to ecTadA) that corresponds to any of the mutations described herein, e.g., any of the mutations identified in ecTadA. In some embodiments, the adenosine deaminase is from a prokaryote. In some embodiments, the adenosine deaminase is from a bacterium. In some embodiments, the adenosine deaminase is from Escherichia coli, Staphylococcus aureus, Salmonella typhi, Shewanella putrefaciens, Haemophilus influenzae, Caulobacter crescentus, or Bacillus subtilis. In some embodiments, the adenosine deaminase is from E. coli.

[0349] In some embodiments, the adenosine deaminase comprises an amino acid sequence that is at least 60%, at least 65%, at least 70%, at least 75%, at least 80%, at least 85%, at least 90%, at least 95%, at least 96%, at least 97%, at least 98%, at least 99%, or at least 99.5% identical to any one of the amino acid sequences set forth in any of the adenosine deaminases provided herein. It should be appreciated that adenosine deaminases provided herein may include one or more mutations (e.g., any of the mutations provided herein). The disclosure provides any deaminase domains with a certain percent identity plus any of the mutations or combinations thereof described herein. In some embodiments, the adenosine deaminase comprises an amino acid sequence that has 1, 2, 3, 4, 5, 6, 7, 8, 9, 10, 11, 12, 13, 14, 15, 16, 17, 18, 19, 20, 21, 22, 21, 24, 25, 26, 27, 28, 29, 30, 31, 32, 33, 34, 35, 36, 37, 38, 39, 40, 41, 42, 43, 44, 45, 46, 47, 48, 49, 50, or more mutations compared to a reference sequence, or any of the adenosine deaminases provided herein. In some embodiments, the adenosine deaminase comprises an amino acid sequence that has at least 5, at least 10, at least 15, at least 20, at least 25, at least 30, at least 35, at least 40, at least 45, at least 50, at least 60, at least 70, at least 80, at least 90, at least 100, at least 110, at least 120, at least 130, at least 140, at least 150, at least 160, or at least 170 identical contiguous amino acid residues as compared to any one of the amino acid sequences known in the art or described herein.

### C to T Editing

[0350] In some embodiments, a base editor disclosed herein comprises a fusion protein comprising cytidine deaminase capable of deaminating a target cytidine (C) base of a polynucleotide to produce uridine (U), which has the base pairing properties of thymine. In some embodiments, for example where the polynucleotide is double-stranded (e.g., DNA), the uridine base can then be substituted with a thymidine base (e.g., by cellular repair machinery) to give rise to a C:G to a T:A transition. In other embodiments, deamination of a C to U in a nucleic acid by a base editor cannot be accompanied by substitution of the U to a T.

[0351] The deamination of a target C in a polynucleotide to give rise to a U is a non-limiting example of a type of base editing that can be executed by a base editor described herein. In another example, a base editor comprising a cytidine deaminase domain can mediate conversion of a cytosine (C) base to a guanine (G) base. For example, a U of a polynucleotide produced by deamination of a cytidine by a cytidine deaminase domain of a base editor can be excised from the polynucleotide by a base excision repair mechanism (e.g., by a uracil DNA glycosylase (UDG) domain), producing an abasic site. The nucleobase opposite the abasic site can then be substituted (e.g., by base repair machinery) with another base, such as a C, by for example a translesion polymerase. Although it is typical for a nucleobase opposite an abasic site to be replaced with a C, other substitutions (e.g., A, G or T) can also occur.

[0352] Accordingly, in some embodiments a base editor described herein comprises a deamination domain (e.g., cytidine deaminase domain) capable of deaminating a target C to a U in a polynucleotide. Further, as described below, the base editor can comprise additional domains which facilitate conversion of the U resulting from deamination to, in some embodiments, a T or a G. For example, a base editor comprising a cytidine deaminase domain can further comprise a uracil glycosylase inhibitor (UGI) domain to mediate substitution of a U by a T, completing a C-to-T base editing event. In another example, a base editor can incorporate a translesion polymerase to improve the efficiency of C-to-G base editing, since a translesion polymerase can facilitate incorporation of a C opposite an abasic site (i.e., resulting in incorporation of a G at the abasic site, completing the C-to-G base editing event).

[0353] A base editor comprising a cytidine deaminase as a domain can deaminate a target C in any polynucleotide, including DNA, RNA and DNA-RNA hybrids. Typically, a cytidine deaminase catalyzes a C nucleobase that is positioned in the context of a single-stranded portion of a polynucleotide. In some embodiments, the entire polynucleotide comprising a target C can be single-stranded. For example, a cytidine deaminase incorporated into the base editor can deaminate a target C in a single-stranded RNA polynucleotide. In other embodiments, a base editor comprising a cytidine deaminase domain can act on a double-stranded polynucleotide, but the target C can be positioned in a portion of the polynucleotide which at the time of the deamination reaction is in a single-stranded state. For example, in embodiments where the NAGPB domain comprises a Cas9 domain, several nucleotides can be left unpaired during formation of the Cas9-gRNA-target DNA complex, resulting in formation of a Cas9 “R-loop complex”. These unpaired nucleotides can form a bubble of single-stranded DNA that can serve as a substrate for a single-strand specific nucleotide deaminase enzyme (e.g., cytidine deaminase).

[0354] In some embodiments, a cytidine deaminase of a base editor can comprise all or a portion of an apolipoprotein B mRNA editing complex (APOBEC) family deaminase. APOBEC is a family of evolutionarily conserved cytidine deaminases. Members of this family are C-to-U editing enzymes. The N-terminal domain of APOBEC like proteins is the catalytic domain, while the C-terminal domain is a pseudocatalytic domain. More specifically, the catalytic domain is a zinc dependent cytidine deaminase domain and is important for cytidine deamination. APOBEC family members include APOBEC1, APOBEC2, APOBEC3A, APOBEC3B, APOBEC3C, APOBEC3D (“APOBEC3E” now refers to this), APOBEC3F, APOBEC3G, APOBEC3H, APOBEC4, and Activation-induced (cytidine) deaminase. In some embodiments, a deaminase incorporated into a base editor comprises all or a portion of an APOBEC1 deaminase. In some embodiments, a deaminase incorporated into a base editor comprises all or a portion of APOBEC2 deaminase. In some embodiments, a deaminase incorporated into a base editor comprises all or a portion of is an APOBEC3 deaminase. In some embodiments, a deaminase incorporated into a base editor comprises all or a portion of an APOBEC3A deaminase. In some embodiments, a deaminase incorporated into a base editor comprises all or a portion of APOBEC3B deaminase. In some embodiments, a deaminase incorporated into a base editor comprises all or a portion of APOBEC3C deaminase. In some embodiments, a deaminase incorporated into a base editor comprises all or a portion of APOBEC3D deaminase. In some embodiments, a deaminase incorporated into a base editor comprises all or a portion of APOBEC3E deaminase. In some embodiments, a deaminase incorporated into a base editor comprises all or a portion of APOBEC3F deaminase. In some embodiments, a deaminase incorporated into a base editor comprises all or a portion of APOBEC3G deaminase. In some embodiments, a deaminase incorporated into a base editor comprises all or a portion of APOBEC3H deaminase. In some embodiments, a deaminase incorporated into a base editor comprises all or a portion of APOBEC4 deaminase. In some embodiments, a deaminase incorporated into a base editor comprises all or a portion of activation-induced deaminase (AID). In some embodiments a deaminase incorporated into a base editor comprises all or a portion of cytidine deaminase 1 (CDA1). It should be appreciated that a base editor can comprise a deaminase from any suitable organism (e.g., a human or a rat). In some embodiments, a deaminase domain of a base editor is from a human, chimpanzee, gorilla, monkey, cow, dog, rat, or mouse. In some embodiments, the deaminase domain of the base editor is derived from rat (e.g., rat APOBEC1). In some embodiments, the deaminase domain of the base editor is human APOBEC1. In some embodiments, the deaminase domain of the base editor is pmCDA1.

[0355] The amino acid and nucleic acid sequences of PmCDA1 are shown herein below. >tr|A5H718|A5H718_PETMA Cytosine deaminase OS=Petromyzon marinus OX=7757 PE=2 SV=1 amino acid sequence:

MTDAEYVRIHEKLDIYTFKKQFFNNKKSVSHRCYVLFELKRRGERRACFWG
YAVNKPQSGTERGIHAEIFSIRKVEEYLRDNPGQFTINWYSSWSPCADCAE
KILEWYNQELRGNGHTLKIWACKLYYEKNARNQIGLWNLRDNGVGLNVMVS
EHYQCCRKIFIQSSHNQLNENRWLEKTLKRAEKRRSELSIMIQVKILHTTK
SPAV

Nucleic acid sequence: >EF094822.1 Petromyzon marinus isolate PmCDA.21 cytosine deaminase mRNA, complete cds:

TGACACGACACAGCCGTGTATATGAGGAAGGGTAGCTGGATGGGGGGGGGG
GGAATACGTTCAGAGAGGACATTAGCGAGCGTCTTGTTGGTGGCCTTGAGT
CTAGACACCTGCAGACATGACCGACGCTGAGTACGTGAGAATCCATGAGAA
GTTGGACATCTACACGTTTAAGAAACAGTTTTTCAACAACAAAAAATCCGT
GTCGCATAGATGCTACGTTCTCTTTGAATTAAAACGACGGGGTGAACGTAG
AGCGTGTTTTTGGGGCTATGCTGTGAATAAACCACAGAGCGGGACAGAACG
TGGAATTCACGCCGAAATCTTTAGCATTAGAAAAGTCGAAGAATACCTGCG
CGACAACCCCGGACAATTCACGATAAATTGGTACTCATCCTGGAGTCCTTG
TGCAGATTGCGCTGAAAAGATCTTAGAATGGTATAACCAGGAGCTGCGGGG
GAACGGCCACACTTTGAAAATCTGGGCTTGCAAACTCTATTACGAGAAAAA
TGCGAGGAATCAAATTGGGCTGTGGAACCTCAGAGATAACGGGGTTGGGTT
GAATGTAATGGTAAGTGAACACTACCAATGTTGCAGGAAAATATTCATCCA
ATCGTCGCACAATCAATTGAATGAGAATAGATGGCTTGAGAAGACTTTGAA
GCGAGCTGAAAAACGACGGAGCGAGTTGTCCATTATGATTCAGGTAAAAAT
ACTCCACACCACTAAGAGTCCTGCTGTTTAAGAGGCTATGCGGATGGTTTT
C

[0356] The amino acid and nucleic acid sequences of the coding sequence (CDS) of human activation-induced cytidine deaminase (AID) are shown below. >tr|Q6QJ80|Q6QJ80_HUMAN Activation-induced cytidine deaminase OS=Homo sapiens OX=9606 GN=AICDA PE=2 SV=1 amino acid sequence:

MDSLLMNRRKFLYQFKNVRWAKGRRETYLCYVVKRRDSATSFSLDFGYLRN
KNGCHVELLFLRYISDWDLDPGRCYRVTWFTSWSPCYDCARHVADFLRGNP
NLSLRIFTARLYFCEDRKAEPEGLRRLHRAGVQIAIMTFKAPV

[0357] The amino acid and nucleic acid sequences of the coding sequence (CDS) of human activation-induced cytidine deaminase (AID) are shown below. >tr|Q6QJ80|Q6QJ80 HUMAN Activation-induced cytidine deaminase OS=Homo sapiens OX=9606 GN=AICDA PE=2 SV=1 amino acid sequence:

MDSLLMNRRKFLYQFKNVRWAKGRRETYLCYVVKRRDSATSFSLDFGYLRN
KNGCHVELLFLRYISDWDLDPGRCYRVTWFTSWSPCYDCARHVADFLRGNP
NLSLRIFTARLYFCEDRKAEPEGLRRLHRAGVQIAIMTFKAPV

[0358] Nucleic acid sequence: >NG_011588.1:5001-15681 Homo sapiens activation induced cytidine deaminase (AICDA), RefSeqGene (LRG 17) on chromosome 12:

AGAGAACCATCATTAATTGAAGTGAGATTTTTCTGGCCTGAGACTTGCAGG
GAGGCAAGAAGACACTCTGGACACCACTATGGACAGGTAAAGAGGCAGTCT
TCTCGTGGGTGATTGCACTGGCCTTCCTCTCAGAGCAAATCTGAGTAATGA
GACTGGTAGCTATCCCTTTCTCTCATGTAACTGTCTGACTGATAAGATCAG
CTTGATCAATATGCATATATATTTTTTGATCTGTCTCCTTTTCTTCTATTC
AGATCTTATACGCTGTCAGCCCAATTCTTTCTGTTTCAGACTTCTCTTGAT
TTCCCTCTTTTTCATGTGGCAAAAGAAGTAGTGCGTACAATGTACTGATTC
GTCCTGAGATTTGTACCATGGTTGAAACTAATTTATGGTAATAATATTAAC
ATAGCAAATCTTTAGAGACTCAAATCATGAAAAGGTAATAGCAGTACTGTA
CTAAAAACGGTAGTGCTAATTTTCGTAATAATTTTGTAAATATTCAACAGT
AAAACAACTTGAAGACACACTTTCCTAGGGAGGCGTTACTGAAATAATTTA
GCTATAGTAAGAAAATTTGTAATTTTAGAAATGCCAAGCATTCTAAATTAA
TTGCTTGAAAGTCACTATGATTGTGTCCATTATAAGGAGACAAATTCATTC
AAGCAAGTTATTTAATGTTAAAGGCCCAATTGTTAGGCAGTTAATGGCACT
TTTACTATTAACTAATCTTTCCATTTGTTCAGACGTAGCTTAACTTACCTC
TTAGGTGTGAATTTGGTTAAGGTCCTCATAATGTCTTTATGTGCAGTTTTT
GATAGGTTATTGTCATAGAACTTATTCTATTCCTACATTTATGATTACTAT
GGATGTATGAGAATAACACCTAATCCTTATACTTTACCTCAATTTAACTCC
TTTATAAAGAACTTACATTACAGAATAAAGATTTTTTAAAAATATATTTTT
TTGTAGAGACAGGGTCTTAGCCCAGCCGAGGCTGGTCTCTAAGTCCTGGCC
CAAGCGATCCTCCTGCCTGGGCCTCCTAAAGTGCTGGAATTATAGACATGA
GCCATCACATCCAATATACAGAATAAAGATTTTTAATGGAGGATTTAATGT
TCTTCAGAAAATTTTCTTGAGGTCAGACAATGTCAAATGTCTCCTCAGTTT
ACACTGAGATTTTGAAAACAAGTCTGAGCTATAGGTCCTTGTGAAGGGTCC
ATTGGAAATACTTGTTCAAAGTAAAATGGAAAGCAAAGGTAAAATCAGCAG
TTGAAATTCAGAGAAAGACAGAAAAGGAGAAAAGATGAAATTCAACAGGAC
AGAAGGGAAATATATTATCATTAAGGAGGACAGTATCTGTAGAGCTCATTA
GTGATGGCAAAATGACTTGGTCAGGATTATTTTTAACCCGCTTGTTTCTGG
TTTGCACGGCTGGGGATGCAGCTAGGGTTCTGCCTCAGGGAGCACAGCTGT
CCAGAGCAGCTGTCAGCCTGCAAGCCTGAAACACTCCCTCGGTAAAGTCCT
TCCTACTCAGGACAGAAATGACGAGAACAGGGAGCTGGAAACAGGCCCCTA
ACCAGAGAAGGGAAGTAATGGATCAACAAAGTTAACTAGCAGGTCAGGATC
ACGCAATTCATTTCACTCTGACTGGTAACATGTGACAGAAACAGTGTAGGC
TTATTGTATTTTCATGTAGAGTAGGACCCAAAAATCCACCCAAAGTCCTTT
ATCTATGCCACATCCTTCTTATCTATACTTCCAGGACACTTTTTCTTCCTT
ATGATAAGGCTCTCTCTCTCTCCACACACACACACACACACACACACACAC
ACACACACACACACACAAACACACACCCCGCCAACCAAGGTGCATGTAAAA
AGATGTAGATTCCTCTGCCTTTCTCATCTACACAGCCCAGGAGGGTAAGTT
AATATAAGAGGGATTTATTGGTAAGAGATGATGCTTAATCTGTTTAACACT
GGGCCTCAAAGAGAGAATTTCTTTTCTTCTGTACTTATTAAGCACCTATTA
TGTGTTGAGCTTATATATACAAAGGGTTATTATATGCTAATATAGTAATAG
TAATGGTGGTTGGTACTATGGTAATTACCATAAAAATTATTATCCTTTTAA
AATAAAGCTAATTATTATTGGATCTTTTTTAGTATTCATTTTATGTTTTTT
ATGTTTTTGATTTTTTAAAAGACAATCTCACCCTGTTACCCAGGCTGGAGT
GCAGTGGTGCAATCATAGCTTTCTGCAGTCTTGAACTCCTGGGCTCAAGCA
ATCCTCCTGCCTTGGCCTCCCAAAGTGTTGGGATACAGTCATGAGCCACTG
CATCTGGCCTAGGATCCATTTAGATTAAAATATGCATTTTAAATTTTAAAA
TAATATGGCTAATTTTTACCTTATGTAATGTGTATACTGGCAATAAATCTA
GTTTGCTGCCTAAAGTTTAAAGTGCTTTCCAGTAAGCTTCATGTACGTGAG
GGGAGACATTTAAAGTGAAACAGACAGCCAGGTGTGGTGGCTCACGCCTGT
AATCCCAGCACTCTGGGAGGCTGAGGTGGGTGGATCGCTTGAGCCCTGGAG
TTCAAGACCAGCCTGAGCAACATGGCAAAACGCTGTTTCTATAACAAAAAT
TAGCCGGGCATGGTGGCATGTGCCTGTGGTCCCAGCTACTAGGGGGCTGAG
GCAGGAGAATCGTTGGAGCCCAGGAGGTCAAGGCTGCACTGAGCAGTGCTT
GCGCCACTGCACTCCAGCCTGGGTGACAGGACCAGACCTTGCCTCAAAAAA
ATAAGAAGAAAAATTAAAAATAAATGGAAACAACTACAAAGAGCTGTTGTC
CTAGATGAGCTACTTAGTTAGGCTGATATTTTGGTATTTAACTTTTAAAGT
CAGGGTCTGTCACCTGCACTACATTATTAAAATATCAATTCTCATGTATAT
CCACACAAAGACTGGTACGTGATGTTCATAGTACCTTTATTCACAAAACCC
CAAAGTAGAGACTATCCAAATATCCATCAACAAGTGAACAAATAAACAAAA
TGTGCTATATCCATGCAATGGAATACCACCCTGCAGTACAAAGAAGCTACT
TGGGGATGAATCCCAAAGTCATGACGCTAAATGAAAGAGTCAGACATGAAG
GAGGAGATAATGTATGCCATACGAAATTCTAGAAAATGAAAGTAACTTATA
GTTACAGAAAGCAAATCAGGGCAGGCATAGAGGCTCACACCTGTAATCCCA
GCACTTTGAGAGGCCACGTGGGAAGATTGCTAGAACTCAGGAGTTCAAGAC
CAGCCTGGGCAACACAGTGAAACTCCATTCTCCACAAAAATGGGAAAAAAA
GAAAGCAAATCAGTGGTTGTCCTGTGGGGAGGGGAAGGACTGCAAAGAGGG
AAGAAGCTCTGGTGGGGTGAGGGTGGTGATTCAGGTTCTGTATCCTGACTG
TGGTAGCAGTTTGGGGTGTTTACATCCAAAAATATTCGTAGAATTATGCAT
CTTAAATGGGTGGAGTTTACTGTATGTAAATTATACCTCAATGTAAGAAAA
AATAATGTGTAAGAAAACTTTCAATTCTCTTGCCAGCAAACGTTATTCAAA
TTCCTGAGCCCTTTACTTCGCAAATTCTCTGCACTTCTGCCCCGTACCATT
AGGTGACAGCACTAGCTCCACAAATTGGATAAATGCATTTCTGGAAAAGAC
TAGGGACAAAATCCAGGCATCACTTGTGCTTTCATATCAACCATGCTGTAC
AGCTTGTGTTGCTGTCTGCAGCTGCAATGGGGACTCTTGATTTCTTTAAGG
AAACTTGGGTTACCAGAGTATTTCCACAAATGCTATTCAAATTAGTGCTTA
TGATATGCAAGACACTGTGCTAGGAGCCAGAAAACAAAGAGGAGGAGAAAT
CAGTCATTATGTGGGAACAACATAGCAAGATATTTAGATCATTTTGACTAG
TTAAAAAAGCAGCAGAGTACAAAATCACACATGCAATCAGTATAATCCAAA
TCATGTAAATATGTGCCTGTAGAAAGACTAGAGGAATAAACACAAGAATCT
TAACAGTCATTGTCATTAGACACTAAGTCTAATTATTATTATTAGACACTA
TGATATTTGAGATTTAAAAAATCTTTAATATTTTAAAATTTAGAGCTCTTC
TATTTTTCCATAGTATTCAAGTTTGACAATGATCAAGTATTACTCTTTCTT
TTTTTTTTTTTTTTTTTTTTTTTGAGATGGAGTTTTGGTCTTGTTGCCCAT
GCTGGAGTGGAATGGCATGACCATAGCTCACTGCAACCTCCACCTCCTGGG
TTCAAGCAAAGCTGTCGCCTCAGCCTCCCGGGTAGATGGGATTACAGGCGC
CCACCACCACACTCGGCTAATGTTTGTATTTTTAGTAGAGATGGGGTTTCA
CCATGTTGGCCAGGCTGGTCTCAAACTCCTGACCTCAGAGGATCCACCTGC
CTCAGCCTCCCAAAGTGCTGGGATTACAGATGTAGGCCACTGCGCCCGGCC
AAGTATTGCTCTTATACATTAAAAAACAGGTGTGAGCCACTGCGCCCAGCC
AGGTATTGCTCTTATACATTAAAAAATAGGCCGGTGCAGTGGCTCACGCCT
GTAATCCCAGCACTTTGGGAAGCCAAGGCGGGCAGAACACCCGAGGTCAGG
AGTCCAAGGCCAGCCTGGCCAAGATGGTGAAACCCCGTCTCTATTAAAAAT
ACAAACATTACCTGGGCATGATGGTGGGCGCCTGTAATCCCAGCTACTCAG
GAGGCTGAGGCAGGAGGATCCGCGGAGCCTGGCAGATCTGCCTGAGCCTGG
GAGGTTGAGGCTACAGTAAGCCAAGATCATGCCAGTATACTTCAGCCTGGG
CGACAAAGTGAGACCGTAACTTTAAAAAAAGAAATTTAGATCAAGATCCAA
CTGTAAAAAGTGGCCTAAACACCACATTAAAGAGTTTGGAGTTTATTCTGC
AGGCAGAAGAGAACCATCAGGGGGTCTTCAGCATGGGAATGGCATGGTGCA
CCTGGTTTTTGTGAGATCATGGTGGTGACAGTGTGGGGAATGTTATTTTGG
AGGGACTGGAGGCAGACAGACCGGTTAAAAGGCCAGCACAACAGATAAGGA
GGAAGAAGATGAGGGCTTGGACCGAAGCAGAGAAGAGCAAACAGGGAAGGT
ACAAATTCAAGAAATATTGGGGGGTTTGAATCAACACATTTAGATGATTAA
TTAAATATGAGGACTGAGGAATAAGAAATGAGTCAAGGATGGTTCCAGGCT
GCTAGGCTGCTTACCTGAGGTGGCAAAGTCGGGAGGAGTGGCAGTTTAGGA
CAGGGGGCAGTTGAGGAATATTGTTTTGATCATTTTGAGTTTGAGGTACAA
GTTGGACACTTAGGTAAAGACTGGAGGGGAAATCTGAATATACAATTATGG
GACTGAGGAACAAGTTTATTTTATTTTTTGTTTCGTTTTCTTGTTGAAGAA
CAAATTTATTGTAATCCCAAGTCATCAGCATCTAGAAGACAGTGGCAGGAG
GTGACTGTCTTGTGGGTAAGGGTTTGGGGTCCTTGATGAGTATCTCTCAAT
TGGCCTTAAATATAAGCAGGAAAAGGAGTTTATGATGGATTCCAGGCTCAG
CAGGGCTCAGGAGGGCTCAGGCAGCCAGCAGAGGAAGTCAGAGCATCTTCT
TTGGTTTAGCCCAAGTAATGACTTCCTTAAAAAGCTGAAGGAAAATCCAGA
GTGACCAGATTATAAACTGTACTCTTGCATTTTCTCTCCCTCCTCTCACCC
ACAGCCTCTTGATGAACCGGAGGAAGTTTCTTTACCAATTCAAAAATGTCC
GCTGGGCTAAGGGTCGGCGTGAGACCTACCTGTGCTACGTAGTGAAGAGGC
GTGACAGTGCTACATCCTTTTCACTGGACTTTGGTTATCTTCGCAATAAGG
TATCAATTAAAGTCGGCTTTGCAAGCAGTTTAATGGTCAACTGTGAGTGCT
TTTAGAGCCACCTGCTGATGGTATTACTTCCATCCTTTTTTGGCATTTGTG
TCTCTATCACATTCCTCAAATCCTTTTTTTTATTTCTTTTTCCATGTCCAT
GCACCCATATTAGACATGGCCCAAAATATGTGATTTAATTCCTCCCCAGTA
ATGCTGGGCACCCTAATACCACTCCTTCCTTCAGTGCCAAGAACAACTGCT
CCCAAACTGTTTACCAGCTTTCCTCAGCATCTGAATTGCCTTTGAGATTAT
TAAGCTAAAAGCATTTTTATATGGGAGAATATTATCAGCTTGTCCAAGCAA
AAATTTTAAATGTGAAAAACAAATTGTGTCTTAAGCATTTTTGAAAATTAA
GGAAGAAGAATTTGGGAAAAAATTAACGGTGGCTCAATTCTGTCTTCCAAA
TGATTTCTTTTCCCTCCTACTCACATGGGTCGTAGGCCAGTGAATACATTC
AACATGGTGATCCCCAGAAAACTCAGAGAAGCCTCGGCTGATGATTAATTA
AATTGATCTTTCGGCTACCCGAGAGAATTACATTTCCAAGAGACTTCTTCA
CCAAAATCCAGATGGGTTTACATAAACTTCTGCCCACGGGTATCTCCTCTC
TCCTAACACGCTGTGACGTCTGGGCTTGGTGGAATCTCAGGGAAGCATCCG
TGGGGTGGAAGGTCATCGTCTGGCTCGTTGTTTGATGGTTATATTACCATG
CAATTTTCTTTGCCTACATTTGTATTGAATACATCCCAATCTCCTTCCTAT
TCGGTGACATGACACATTCTATTTCAGAAGGCTTTGATTTTATCAAGCACT
TTCATTTACTTCTCATGGCAGTGCCTATTACTTCTCTTACAATACCCATCT
GTCTGCTTTACCAAAATCTATTTCCCCTTTTCAGATCCTCCCAAATGGTCC
TCATAAACTGTCCTGCCTCCACCTAGTGGTCCAGGTATATTTCCACAATGT
TACATCAACAGGCACTTCTAGCCATTTTCCTTCTCAAAAGGTGCAAAAAGC
AACTTCATAAACACAAATTAAATCTTCGGTGAGGTAGTGTGATGCTGCTTC
CTCCCAACTCAGCGCACTTCGTCTTCCTCATTCCACAAAAACCCATAGCCT
TCCTTCACTCTGCAGGACTAGTGCTGCCAAGGGTTCAGCTCTACCTACTGG
TGTGCTCTTTTGAGCAAGTTGCTTAGCCTCTCTGTAACACAAGGACAATAG
CTGCAAGCATCCCCAAAGATCATTGCAGGAGACAATGACTAAGGCTACCAG
AGCCGCAATAAAAGTCAGTGAATTTTAGCGTGGTCCTCTCTGTCTCTCCAG
AACGGCTGCCACGTGGAATTGCTCTTCCTCCGCTACATCTCGGACTGGGAC
CTAGACCCTGGCCGCTGCTACCGCGTCACCTGGTTCACCTCCTGGAGCCCC
TGCTACGACTGTGCCCGACATGTGGCCGACTTTCTGCGAGGGAACCCCAAC
CTCAGTCTGAGGATCTTCACCGCGCGCCTCTACTTCTGTGAGGACCGCAAG
GCTGAGCCCGAGGGGCTGCGGCGGCTGCACCGCGCCGGGGTGCAAATAGCC
ATCATGACCTTCAAAGGTGCGAAAGGGCCTTCCGCGCAGGCGCAGTGCAGC
AGCCCGCATTCGGGATTGCGATGCGGAATGAATGAGTTAGTGGGGAAGCTC
GAGGGGAAGAAGTGGGCGGGGATTCTGGTTCACCTCTGGAGCCGAAATTAA
AGATTAGAAGCAGAGAAAAGAGTGAATGGCTCAGAGACAAGGCCCCGAGGA
AATGAGAAAATGGGGCCAGGGTTGCTTCTTTCCCCTCGATTTGGAACCTGA
ACTGTCTTCTACCCCCATATCCCCGCCTTTTTTTCCTTTTTTTTTTTTTGA
AGATTATTTTTACTGCTGGAATACTTTTGTAGAAAACCACGAAAGAACTTT
CAAAGCCTGGGAAGGGCTGCATGAAAATTCAGTTCGTCTCTCCAGACAGCT
TCGGCGCATCCTTTTGGTAAGGGGCTTCCTCGCTTTTTAAATTTTCTTTCT
TTCTCTACAGTCTTTTTTGGAGTTTCGTATATTTCTTATATTTTCTTATTG
TTCAATCACTCTCAGTTTTCATCTGATGAAAACTTTATTTCTCCTCCACAT
CAGCTTTTTCTTCTGCTGTTTCACCATTCAGAGCCCTCTGCTAAGGTTCCT
TTTCCCTCCCTTTTCTTTCTTTTGTTGTTTCACATCTTTAAATTTCTGTCT
CTCCCCAGGGTTGCGTTTCCTTCCTGGTCAGAATTCTTTTCTCCTTTTTTT
TTTTTTTTTTTTTTTTTTTTAAACAAACAAACAAAAAACCCAAAAAAACTC
TTTCCCAATTTACTTTCTTCCAACATGTTACAAAGCCATCCACTCAGTTTA
GAAGACTCTCCGGCCCCACCGACCCCCAACCTCGTTTTGAAGCCATTCACT
CAATTTGCTTCTCTCTTTCTCTACAGCCCCTGTATGAGGTTGATGACTTAC
GAGACGCATTTCGTACTTTGGGACTTTGATAGCAACTTCCAGGAATGTCAC
ACACGATGAAATATCTCTGCTGAAGACAGTGGATAAAAAACAGTCCTTCAA
GTCTTCTCTGTTTTTATTCTTCAACTCTCACTTTCTTAGAGTTTACAGAAA
AAATATTTATATACGACTCTTTAAAAAGATCTATGTCTTGAAAATAGAGAA
GGAACACAGGTCTGGCCAGGGACGTGCTGCAATTGGTGCAGTTTTGAATGC
AACATTGTCCCCTACTGGGAATAACAGAACTGCAGGACCTGGGAGCATCCT
AAAGTGTCAACGTTTTTCTATGACTTTTAGGTAGGATGAGAGCAGAAGGTA
GATCCTAAAAAGCATGGTGAGAGGATCAAATGTTTTTATATCAACATCCTT
TATTATTTGATTCATTTGAGTTAACAGTGGTGTTAGTGATAGATTTTTCTA
TTCTTTTCCCTTGACGTTTACTTTCAAGTAACACAAACTCTTCCATCAGGC
CATGATCTATAGGACCTCCTAATGAGAGTATCTGGGTGATTGTGACCCCAA
ACCATCTCTCCAAAGCATTAATATCCAATCATGCGCTGTATGTTTTAATCA
GCAGAAGCATGTTTTTATGTTTGTACAAAAGAAGATTGTTATGGGTGGGGA
TGGAGGTATAGACCATGCATGGTCACCTTCAAGCTACTTTAATAAAGGATC
TTAAAATGGGCAGGAGGACTGTGAACAAGACACCCTAATAATGGGTTGATG
TCTGAAGTAGCAAATCTTCTGGAAACGCAAACTCTTTTAAGGAAGTCCCTA
ATTTAGAAACACCCACAAACTTCACATATCATAATTAGCAAACAATTGGAA
GGAAGTTGCTTGAATGTTGGGGAGAGGAAAATCTATTGGCTCTCGTGGGTC
TCTTCATCTCAGAAATGCCAATCAGGTCAAGGTTTGCTACATTTTGTATGT
GTGTGATGCTTCTCCCAAAGGTATATTAACTATATAAGAGAGTTGTGACAA
AACAGAATGATAAAGCTGCGAACCGTGGCACACGCTCATAGTTCTAGCTGC
TTGGGAGGTTGAGGAGGGAGGATGGCTTGAACACAGGTGTTCAAGGCCAGC
CTGGGCAACATAACAAGATCCTGTCTCTCAAAGAAGAGAGAGGGCCGGGCG
TGGTGGCTCACGCCTGTAATCCCAGCACTTTGGGAGGCCGAGCCGGGCGGA
TCACCTGTGGTCAGGAGTTTGAGACCAGCCTGGCCAACATGGCAAAACCCC
GTCTGTACTCAAAATGCAAAAATTAGCCAGGCGTGGTAGCAGGCACCTGTA
ATCCCAGCTACTTGGGAGGCTGAGGCAGGAGAATCGCTTGAACCCAGGAGG
TGGAGGTTGCAGTAAGCTGAGATCGTGCCGTTGCACTCCAGCCTGGGCGAC
AAGAGCAGACTCTGTCTCAGAAGAGAGAGAGAGAGAAGAGACATATTTGGG
AGAGAAGGATGGGGAAGCATTGCAAGGAAATTGTGCTTTATCCAACAAAAT
GTAAGGAGCCAATAAGGGATCCCTATTTGTCTCTTTTGGTGTCTATTTGTC
CCTAACAACTGTCTTTGACAGTGAGAAAAATATTCAGAATAACCATATCCC
TGTGCCGTTATTACCTAGCAACCCTTGCAATGAAGATGAGCAGATCCACAG
GAAAACTTGAATGCACAACTGTCTTATTTTAATCTTATTGTACATAAGTTT
GTAAAAGAGTTAAAAATTGTTACTTCATGTATTCATTTATATTTTATATTA
TTTTGCGTCTAATGATTTTTTATTAACATGATTTCCTTTTCTGATATATTG
AAATGGAGTCTCAAAGCTTCATAAATTTATAACTTTAGAAATGATTCTAAT
AACAACGTATGTAATTGTAACATTGCAGTAATGGTGCTACGAAGCCATTTC
TCTTGATTTTTAGTAAACTTTTATGACAGCAAATTTGCTTCTGGCTCACTT
TCAATCAGTTAAATAAATGATAAATAATTTTGGAAGCTGTGAAGATAAAAT
ACCAAATAAAATAATATAAAAGTGATTTATATGAAGTTAAAATAAAAAATC
AGTATGATGGAATAAACTTG

[0359] Other exemplary deaminases that can be fused to Cas9 according to aspects of this disclosure are provided below. In embodiments, the deaminases are activation-induced deaminases (AID). It should be understood that, in some embodiments, the active domain of the respective sequence can be used, e.g., the domain without a localizing signal (nuclear localization sequence, without nuclear export signal, cytoplasmic localizing signal).

Human AID:
[sequence omitted]
(underline: nuclear localization sequence; double underline:
nuclear export signal)
Mouse AID:
MDSLLMKQKKFLYHFKNVRWAKGRHETYLCYVVKRRDSATSCSLDFGHLRNKSGCHVELLFL
RYISDWDLDPGRCYRVTWFTSWSPCYDCARHVAEFLRWNPNLSLRIFTARLYFCEDRKAEPE
GLRRLHRAGVQIGIMTFKDYFYCWNTFVENRERTFKAWEGLHENSVRLTRQLRRILLPLYEV
DDLRDAFRMLGF
(underline: nuclear localization sequence; double underline:
nuclear export signal)
Canine AID:
MDSLLMKQRKFLYHFKNVRWAKGRHETYLCYVVKRRDSATSFSLDFGHLRNKSGCHVELLFL
RYISDWDLDPGRCYRVTWFTSWSPCYDCARHVADFLRGYPNLSLRIFAARLYFCEDRKAEPE
GLRRLHRAGVQIAIMTFKDYFYCWNTFVENREKTFKAWEGLHENSVRLSRQLRRILLPLYEV
DDLRDAFRTLGL
(underline: nuclear localization sequence; double underline:
nuclear export signal)
Bovine AID:
MDSLLKKQRQFLYQFKNVRWAKGRHETYLCYVVKRRDSPTSFSLDFGHLRNKAGCHVELLFL
RYISDWDLDPGRCYRVTWFTSWSPCYDCARHVADFLRGYPNLSLRIFTARLYFCDKERKAEP
EGLRRLHRAGVQIAIMTFKDYFYCWNTFVENHERTFKAWEGLHENSVRLSRQLRRILLPLYE
VDDLRDAFRTLGL
(underline: nuclear localization sequence; double underline:
nuclear export signal)
Rat AID:
MAVGSKPKAALVGPHWERERIWCFLCSTGLGTQQTGQTSRWLRPAATQDPVSPPRSLLMKQR
KFLYHFKNVRWAKGRHETYLCYVVKRRDSATSFSLDFGYLRNKSGCHVELLFLRYISDWDLD
PGRCYRVTWFTSWSPCYDCARHVADFLRGNPNLSLRIFTARLTGWGALPAGLMSPARPSDYF
YCWNTFVENHERTFKAWEGLHENSVRLSRRLRRILLPLYEVDDLRDAFRTLGL
(underline: nuclear localization sequence; double underline:
nuclear export signal)
Mouse APOBEC-3-(2):
MGPFCLGCSHRKCYSPIRNLISQETFKFHFKNLGYAKGRKDTFLCYEVTRKDCDSPVSLHHGVFKNKD
NIHAEICFLYWFHDKVLKVLSPREEFKITWYMSWSPCFECAEQIVRFLATHHNLSLDIFSSRLYNVQD
PETQQNLCRLVQEGAQVAAMDLYEFKKCWKKFVDNGGRRFRPWKRLLTNFRYQDSKLQEILRPCYIPV
PSSSSSTLSNICLTKGLPETRFCVEGRRMDPLSEEEFYSQFYNQRVKHLCYYHRMKPYLCYQLEQFNG
QAPLKGCLLSEKGKQHAEILFLDKIRSMELSQVTITCYLTWSPCPNCAWQLAAFKRDRPDLILHIYTS
RLYFHWKRPFQKGLCSLWQSGILVDVMDLPQFTDCWTNFVNPKRPFWPWKGLEIISRRTQRRLRRIKE
SWGLQDLVNDFGNLQLGPPMS
(italic: nucleic acid editing domain)
Rat APOBEC-3:
MGPFCLGCSHRKCYSPIRNLISQETFKFHFKNRLRYAIDRKDTFLCYEVTRKDCDSPVSLHHGVFKNK
DNIHAEICFLYWFHDKVLKVLSPREEFKITWYMSWSPCFECAEQVLRFLATHHNLSLDIFSSRLYNIR
DPENQQNLCRLVQEGAQVAAMDLYEFKKCWKKFVDNGGRRFRPWKKLLTNFRYQDSKLQEILRPCYIP
VPSSSSSTLSNICLTKGLPETRFCVERRRVHLLSEEEFYSQFYNQRVKHLCYYHGVKPYLCYQLEQFN
GQAPLKGCLLSEKGKQHAEILFLDKIRSMELSQVIITCYLTWSPCPNCAWQLAAFKRDRPDLILHIYT
SRLYFHWKRPFQKGLCSLWQSGILVDVMDLPQFTDCWTNFVNPKRPFWPWKGLEIISRRTQRRLHRIK
ESWGLQDLVNDFGNLQLGPPMS
(italic: nucleic acid editing domain)
Rhesus macaque APOBEC-3G:
MVEPMDPRTFVSNFNNRPILSGLNTVWLCCEVKTKDPSGPPLDAKIFQGKVYSKAKYHPEMRFLRWFH
KWRQLHHDQEYKVTWYVSWSPCTRCANSVATFLAKDPKVTLTIFVARLYYFWKPDYQQALRILCQKRG
GPHATMKIMNYNEFQDCWNKFVDGRGKPFKPRNNLPKHYTLLQATLGELLRHLMDPGTFTSNFNNKPW
VSGQHETYLCYKVERLHNDTWVPLNQHRGFLRNQAPNIHGFPKGRHAELCFLDLIPFWKLDGQQYRVT
CFTSWSPCFSCAQEMAKFISNNEHVSLCIFAARIYDDQGRYQEGLRALHRDGAKIAMMNYSEFEYCWD
TFVDRQGRPFQPWDGLDEHSQALSGRLRAI
(italic: nucleic acid editing domain; underline: cytoplasmic
localization signal)
Chimpanzee APOBEC-3G:
MKPHFRNPVERMYQDTFSDNFYNRPILSHRNTVWLCYEVKTKGPSRPPLDAKIFRGQVYSKLKYHPEM
RFFHWFSKWRKLHRDQEYEVTWYISWSPCTKCTRDVATFLAEDPKVTLTIFVARLYYFWDPDYQEALR
SLCQKRDGPRATMKIMNYDEFQHCWSKFVYSQRELFEPWNNLPKYYILLHIMLGEILRHSMDPPTFTS
NFNNELWVRGRHETYLCYEVERLHNDTWVLLNQRRGFLCNQAPHKHGFLEGRHAELCFLDVIPFWKLD
LHQDYRVTCFTSWSPCFSCAQEMAKFISNNKHVSLCIFAARIYDDQGRCQEGLRTLAKAGAKISIMTY
SEFKHCWDTFVDHQGCPFQPWDGLEEHSQALSGRLRAILQNQGN
(italic: nucleic acid editing domain; underline: cytoplasmic
localization signal)
Green monkey APOBEC-3G:
MNPQIRNMVEQMEPDIFVYYFNNRPILSGRNTVWLCYEVKTKDPSGPPLDANIFQGKLYPEAKDHPEM
KFLHWFRKWRQLHRDQEYEVTWYVSWSPCTRCANSVATFLAEDPKVTLTIFVARLYYFWKPDYQQALR
ILCQERGGPHATMKIMNYNEFQHCWNEFVDGQGKPFKPRKNLPKHYTLLHATLGELLRHVMDPGTFTS
NFNNKPWVSGQRETYLCYKVERSHNDTWVLLNQHRGFLRNQAPDRHGFPKGRHAELCFLDVIPFWKLD
DQQYRVTCFTSWSPCFSCAQKMAKFISNNKHVSLCIFAARIYDDQGRCQEGLRTLHRDGAKIAVMNYS
EFEYCWDTFVDRQGRPFQPWDGLDEHSQALSGRLRAI
(italic: nucleic acid editing domain; underline: cytoplasmic
localization signal)
Human APOBEC-3G:
MKPHFRNTVERMYRDTFSYNFYNRPILSRRNTVWLCYEVKTKGPSRPPLDAKIFRGQVYSELKYHPEM
RFFHWFSKWRKLHRDQEYEVTWYISWSPCTKCTRDMATFLAEDPKVTLTIFVARLYYFWDPDYQEALR
SLCQKRDGPRATMKIMNYDEFQHCWSKFVYSQRELFEPWNNLPKYYILLHIMLGEILRHSMDPPTFTF
NFNNEPWVRGRHETYLCYEVERMHNDTWVLLNQRRGFLCNQAPHKHGFLEGRHAELCFLDVIPFWKLD
LDQDYRVTCFTSWSPCFSCAQEMAKFISKNKHVSLCIFTARIYDDQGRCQEGLRTLAEAGAKISIMTY
SEFKHCWDTFVDHQGCPFQPWDGLDEHSQDLSGRLRAILQNQEN
(italic: nucleic acid editing domain; underline: cytoplasmic
localization signal)
Human APOBEC-3F:
MKPHFRNTVERMYRDTFSYNFYNRPILSRRNTVWLCYEVKTKGPSRPRLDAKIFRGQVYSQPEHHAEM
CFLSWFCGNQLPAYKCFQITWFVSWTPCPDCVAKLAEFLAEHPNVTLTISAARLYYYWERDYRRALCR
LSQAGARVKIMDDEEFAYCWENFVYSEGQPFMPWYKFDDNYAFLHRTLKEILRNPMEAMYPHIFYFHF
KNLRKAYGRNESWLCFTMEVVKHHSPVSWKRGVFRNQVDPETHCHAERCFLSWFCDDILSPNTNYEVT
WYTSWSPCPECAGEVAEFLARHSNVNLTIFTARLYYFWDTDYQEGLRSLSQEGASVEIMGYKDFKYCW
ENFVYNDDEPFKPWKGLKYNFLFLDSKLQEILE
(italic: nucleic acid editing domain)
Human APOBEC-3B:
MNPQIRNPMERMYRDTFYDNFENEPILYGRSYTWLCYEVKIKRGRSNLLWDTGVFRGQVYFKPQYHAE
MCFLSWFCGNQLPAYKCFQITWFVSWTPCPDCVAKLAEFLSEHPNVTLTISAARLYYYWERDYRRALC
RLSQAGARVTIMDYEEFAYCWENFVYNEGQQFMPWYKFDENYAFLHRTLKEILRYLMDPDTFTFNFNN
DPLVLRRRQTYLCYEVERLDNGTWVLMDQHMGFLCNEAKNLLCGFYGRHAELRFLDLVPSLQLDPAQI
YRVTWFISWSPCFSWGCAGEVRAFLQENTHVRLRIFAARIYDYDPLYKEALQMLRDAGAQVSIMTYDE
FEYCWDTFVYRQGCPFQPWDGLEEHSQALSGRLRAILQNQGN
(italic: nucleic acid editing domain)
Rat APOBEC-3B:
MQPQGLGPNAGMGPVCLGCSHRRPYSPIRNPLKKLYQQTFYFHFKNVRYAWGRKNNFLCYEVNGMDCA
LPVPLRQGVFRKQGHIHAELCFIYWFHDKVLRVLSPMEEFKVTWYMSWSPCSKCAEQVARFLAAHRNL
SLAIFSSRLYYYLRNPNYQQKLCRLIQEGVHVAAMDLPEFKKCWNKFVDNDGQPFRPWMRLRINFSFY
DCKLQEIFSRMNLLREDVFYLQFNNSHRVKPVQNRYYRRKSYLCYQLERANGQEPLKGYLLYKKGEQH
VEILFLEKMRSMELSQVRITCYLTWSPCPNCARQLAAFKKDHPDLILRIYTSRLYFWRKKFQKGLCTL
WRSGIHVDVMDLPQFADCWTNFVNPQRPFRPWNELEKNSWRIQRRLRRIKESWGL
Bovine APOBEC-3B:
DGWEVAFRSGTVLKAGVLGVSMTEGWAGSGHPGQGACVWTPGTRNTMNLLREVLFKQQFGNQPRVPAP
YYRRKTYLCYQLKQRNDLTLDRGCFRNKKQRHAERFIDKINSLDLNPSQSYKIICYITWSPCPNCANE
LVNFITRNNHLKLEIFASRLYFHWIKSFKMGLQDLQNAGISVAVMTHTEFEDCWEQFVDNQSRPFQPW
DKLEQYSASIRRRLQRILTAPI
Chimpanzee APOBEC-3B:
MNPQIRNPMEWMYQRTFYYNFENEPILYGRSYTWLCYEVKIRRGHSNLLWDTGVFRGQMYSQPEHHAE
MCFLSWFCGNQLSAYKCFQITWFVSWTPCPDCVAKLAKFLAEHPNVTLTISAARLYYYWERDYRRALC
RLSQAGARVKIMDDEEFAYCWENFVYNEGQPFMPWYKFDDNYAFLHRTLKEIIRHLMDPDTFTFNFNN
DPLVLRRHQTYLCYEVERLDNGTWVLMDQHMGFLCNEAKNLLCGFYGRHAELRFLDLVPSLQLDPAQI
YRVTWFISWSPCFSWGCAGQVRAFLQENTHVRLRIFAARIYDYDPLYKEALQMLRDAGAQVSIMTYDE
FEYCWDTFVYRQGCPFQPWDGLEEHSQALSGRLRAILQVRASSLCMVPHRPPPPPQSPGPCLPLCSEP
PLGSLLPTGRPAPSLPFLLTASFSFPPPASLPPLPSLSLSPGHLPVPSFHSLTSCSIQPPCSSRIRET
EGWASVSKEGRDLG
Human APOBEC-3C:
MNPQIRNPMKAMYPGTFYFQFKNLWEANDRNETWLCFTVEGIKRRSVVSWKTGVFRNQVDSETHCHAE
RCFLSWFCDDILSPNTKYQVTWYTSWSPCPDCAGEVAEFLARHSNVNLTIFTARLYYFQYPCYQEGLR
SLSQEGVAVEIMDYEDFKYCWENFVYNDNEPFKPWKGLKTNFRLLKRRLRESLQ
(italic: nucleic acid editing domain)
Gorilla APOBEC-3C
MNPQIRNPMKAMYPGTFYFQFKNLWEANDRNETWLCFTVEGIKRRSVVSWKTGVFRNQVDSETHCHAE
RCFLSWECDDILSPNTNYQVTWYTSWSPCPECAGEVAEFLARHSNVNLTIFTARLYYFQDTDYQEGLR
SLSQEGVAVKIMDYKDFKYCWENFVYNDDEPFKPWKGLKYNFRFLKRRLQEILE
(italic: nucleic acid editing domain)
Human APOBEC-3A:
MEASPASGPRHLMDPHIFTSNFNNGIGRHKTYLCYEVERLDNGTSVKMDQHRGFLHNQAKNLLCGFYG
RHAELRFLDLVPSLQLDPAQIYRVTWFISWSPCFSWGCAGEVRAFLQENTHVRLRIFAARIYDYDPLY
KEALQMLRDAGAQVSIMTYDEFKHCWDTFVDHQGCPFQPWDGLDEHSQALSGRLRAILQNQGN
(italic: nucleic acid editing domain)
Rhesus macaque APOBEC-3A:
MDGSPASRPRHLMDPNTFTFNFNNDLSVRGRHQTYLCYEVERLDNGTWVPMDERRGFLCNKAKNVPCG
DYGCHVELRFLCEVPSWQLDPAQTYRVTWFISWSPCFRRGCAGQVRVFLQENKHVRLRIFAARIYDYD
PLYQEALRTLRDAGAQVSIMTYEEFKHCWDTFVDRQGRPFQPWDGLDEHSQALSGRLRAILQNQGN
(italic: nucleic acid editing domain)
Bovine APOBEC-3A:
MDEYTFTENFNNQGWPSKTYLCYEMERLDGDATIPLDEYKGFVRNKGLDQPEKPCHAELYFLGKIHSW
NLDRNQHYRLTCFISWSPCYDCAQKLTTFLKENHHISLHILASRIYTHNRFGCHQSGLCELQAAGARI
TIMTFEDFKHCWETFVDHKGKPFQPWEGLNVKSQALCTELQAILKTQQN
(italic: nucleic acid editing domain)
Human APOBEC-3H:
MALLTAETFRLQFNNKRRLRRPYYPRKALLCYQLTPQNGSTPTRGYFENKKKCHAEICFINEIKSMGL
DETQCYQVTCYLTWSPCSSCAWELVDFIKAHDHLNLGIFASRLYYHWCKPQQKGLRLLCGSQVPVEVM
GFPKFADCWENFVDHEKPLSFNPYKMLEELDKNSRAIKRRLERIKIPGVRAQGRYMDILCDAEV
(italic: nucleic acid editing domain)
Rhesus macaque APOBEC-3H:
MALLTAKTFSLQFNNKRRVNKPYYPRKALLCYQLTPQNGSTPTRGHLKNKKKDHAEIRFINKIKSMGL
DETQCYQVTCYLTWSPCPSCAGELVDFIKAHRHLNLRIFASRLYYHWRPNYQEGLLLLCGSQVPVEVM
GLPEFTDCWENFVDHKEPPSFNPSEKLEELDKNSQAIKRRLERIKSRSVDVLENGLRSLQLGPVTPSS
SIRNSR
Human APOBEC-3D:
MNPQIRNPMERMYRDTFYDNFENEPILYGRSYTWLCYEVKIKRGRSNLLWDTGVFRGPVLPKRQSNHR
QEVYFRFENHAEMCFLSWFCGNRLPANRRFQITWFVSWNPCLPCVVKVTKFLAEHPNVTLTISAARLY
YYRDRDWRWVLLRLHKAGARVKIMDYEDFAYCWENFVCNEGQPFMPWYKFDDNYASLHRTLKEILRNP
MEAMYPHIFYFHFKNLLKACGRNESWLCFTMEVTKHHSAVFRKRGVFRNQVDPETHCHAERCFLSWFC
DDILSPNTNYEVTWYTSWSPCPECAGEVAEFLARHSNVNLTIFTARLCYFWDTDYQEGLCSLSQEGAS
VKIMGYKDFVSCWKNFVYSDDEPFKPWKGLQINFRLLKRRLREILQ
(italic: nucleic acid editing domain)
Human APOBEC-1:
MTSEKGPSTGDPTLRRRIEPWEFDVFYDPRELRKEACLLYEIKWGMSRKIWRSSGKNTINHVEVNFIK
KFTSERDFHPSMSCSITWFLSWSPCWECSQAIREFLSRHPGVTLVIYVARLFWHMDQQNRQGLRDLVN
SGVTIQIMRASEYYHCWRNFVNYPPGDEAHWPQYPPLWMMLYALELHCIILSLPPCLKISRRWQNHLT
FFRLHLQNCHYQTIPPHILLATGLIHPSVAWR
Mouse APOBEC-1:
MSSETGPVAVDPTLRRRIEPHEFEVFFDPRELRKETCLLYEINWGGRHSVWRHTSQNTSNHVEVNFLE
KFTTERYFRPNTRCSITWFLSWSPCGECSRAITEFLSRHPYVTLFIYIARLYHHTDQRNRQGLRDLIS
SGVTIQIMTEQEYCYCWRNFVNYPPSNEAYWPRYPHLWVKLYVLELYCIILGLPPCLKILRRKQPQLT
FFTITLQTCHYQRIPPHLLWATGLK
Rat APOBEC-1:
[sequence omitted]
Human APOBEC-2:
MAQKEEAAVATEAASQNGEDLENLDDPEKLKELIELPPFEIVTGERLPANFFKFQFRNVEYSSGRNKT
FLCYVVEAQGKGGQVQASRGYLEDEHAAAHAEEAFFNTILPAFDPALRYNVTWYVSSSPCAACADRII
KTLSKTKNLRLLILVGRLFMWEEPEIQAALKKLKEAGCKLRIMKPQDFEYVWQNFVEQEEGESKAFQP
WEDIQENFLYYEEKLADILK
Mouse APOBEC-2:
MAQKEEAAEAAAPASQNGDDLENLEDPEKLKELIDLPPFEIVTGVRLPVNFFKFQFRNVEYSSGRNKT
FLCYVVEVQSKGGQAQATQGYLEDEHAGAHAEEAFFNTILPAFDPALKYNVTWYVSSSPCAACADRIL
KTLSKTKNLRLLILVSRLFMWEEPEVQAALKKLKEAGCKLRIMKPQDFEYIWQNFVEQEEGESKAFEP
WEDIQENFLYYEEKLADILK
Rat APOBEC-2:
MAQKEEAAEAAAPASQNGDDLENLEDPEKLKELIDLPPFEIVTGVRLPVNFFKFQFRNVEYSSGRNKT
FLCYVVEAQSKGGQVQATQGYLEDEHAGAHAEEAFFNTILPAFDPALKYNVTWYVSSSPCAACADRIL
KTLSKTKNLRLLILVSRLFMWEEPEVQAALKKLKEAGCKLRIMKPQDFEYLWQNFVEQEEGESKAFEP
WEDIQENFLYYEEKLADILK
Bovine APOBEC-2:
MAQKEEAAAAAEPASQNGEEVENLEDPEKLKELIELPPFEIVTGERLPAHYFKFQFRNVEYSSGRNKT
FLCYVVEAQSKGGQVQASRGYLEDEHATNHAEEAFFNSIMPTFDPALRYMVTWYVSSSPCAACADRIV
KTLNKTKNLRLLILVGRLFMWEEPEIQAALRKLKEAGCRLRIMKPQDFEYIWQNFVEQEEGESKAFEP
WEDIQENFLYYEEKLADILK
Petromyzon marinus CDA1 (pmCDA1):
MTDAEYVRIHEKLDIYTFKKQFFNNKKSVSHRCYVLFELKRRGERRACFWGYAVNKPQSGTERGIHAE
IFSIRKVEEYLRDNPGQFTINWYSSWSPCADCAEKILEWYNQELRGNGHTLKIWACKLYYEKNARNQI
GLWNLRDNGVGLNVMVSEHYQCCRKIFIQSSHNQ
LNENRWLEKTLKRAEKRRSELSFMIQVKILHTTKSPAV
Human APOBEC3G D316R D317R:
MKPHFRNTVERMYRDTFSYNFYNRPILSRRNTVWLCYEVKTKGPSRPPLDAKIFRGQVYSELKYHPEM
RFFHWFSKWRKLHRDQEYEVTWYISWSPCTKCTRDMATFLAEDPKVTLTIFVARLYYFWDPDYQEALR
SLCQKRDGPRATMKFNYDEFQHCWSKFVYSQRELFEPWNNLPKYYILLHFMLGEILRHSMDPPTFTFN
FNNEPWVRGRHETYLCYEVERMHNDTWVLLNQRRGFLCNQAPHKHGFLEGRHAELCFLDVIPFWKLDL
DQDYRVTCFTSWSPCFSCAQEMAKFISKKHVSLCIFTARIYRRQGRCQEGLRTLAEAGAKISFTYSEF
KHCWDTFVDHQGCPFQPWDGLDEHSQDLSGRLRAILQNQEN
Human APOBEC3G chain A:
MDPPTFTFNFNNEPWWGRHETYLCYEVERMHNDTWVLLNQRRGFLCNQAPHKHGFLEGRHAELCFLDV
IPFWKLDLDQDYRVTCFTSWSPCFSCAQEMAKFISKNKHVSLCIFTARIYDDQGRCQEGLRTLAEAGA
KISFTYSEFKHCWDTFVDHQGCPFQPWDGLDEHSQDLSGRLRAILQ
Human APOBEC3G chain A D120R D121R:
MDPPTFTFNFNNEPWVRGRHETYLCYEVERMHNDTWVLLNQRRGFLCNQAPHKHGFLEGRHAELCFLD
VIPFWKLDLDQDYRVTCFTSWSPCFSCAQEMAKFISKNKHVSLCIFTARIYRRQGRCQEGLRTLAEAG
AKISFMTYSEFKHCWDTFVDHQGCPFQPWDGLDEHSQDLSGRLRAILQ

[0360] Some aspects of the present disclosure are based on the recognition that modulating the deaminase domain catalytic activity of any of the fusion proteins described herein, for example by making point mutations in the deaminase domain, affect the processivity of the fusion proteins (e.g., base editors). For example, mutations that reduce, but do not eliminate, the catalytic activity of a deaminase domain within a base editing fusion protein can make it less likely that the deaminase domain will catalyze the deamination of a residue adjacent to a target residue, thereby narrowing the deamination window. The ability to narrow the deamination window can prevent unwanted deamination of residues adjacent to specific target residues, which can decrease or prevent off-target effects.

[0361] For example, in some embodiments, an APOBEC deaminase incorporated into a base editor can comprise one or more mutations selected from the group consisting of H121X, H122X, R126X, R126X, R118X, W90X, W90X, and R132X of rAPOBEC1, or one or more corresponding mutations in another APOBEC deaminase, wherein X is any amino acid. In some embodiments, an APOBEC deaminase incorporated into a base editor can comprise one or more mutations selected from the group consisting of H121R, H122R, R126A, R126E, R118A, W90A, W90Y, and R132E of rAPOBEC1, or one or more corresponding mutations in another APOBEC deaminase.

[0362] In some embodiments, an APOBEC deaminase incorporated into a base editor can comprise one or more mutations selected from the group consisting of D316X, D317X, R320X, R320X, R313X, W285X, W285X, R326X of hAPOBEC3G, or one or more corresponding mutations in another APOBEC deaminase, wherein X is any amino acid. In some embodiments, any of the fusion proteins provided herein comprise an APOBEC deaminase comprising one or more mutations selected from the group consisting of D316R, D317R, R320A, R320E, R313A, W285A, W285Y, R326E of hAPOBEC3G, or one or more corresponding mutations in another APOBEC deaminase.

[0363] In some embodiments, an APOBEC deaminase incorporated into a base editor can comprise a H121R and a H122R mutation of rAPOBEC1, or one or more corresponding mutations in another APOBEC deaminase. In some embodiments an APOBEC deaminase incorporated into a base editor can comprise an APOBEC deaminase comprising a R126A mutation of rAPOBEC1, or one or more corresponding mutations in another APOBEC deaminase. In some embodiments, an APOBEC deaminase incorporated into a base editor can comprise an APOBEC deaminase comprising a R126E mutation of rAPOBEC1, or one or more corresponding mutations in another APOBEC deaminase. In some embodiments, an APOBEC deaminase incorporated into a base editor can comprise an APOBEC deaminase comprising a R118A mutation of rAPOBEC1, or one or more corresponding mutations in another APOBEC deaminase. In some embodiments, an APOBEC deaminase incorporated into a base editor can comprise an APOBEC deaminase comprising a W90A mutation of rAPOBEC1, or one or more corresponding mutations in another APOBEC deaminase. In some embodiments, an APOBEC deaminase incorporated into a base editor can comprise an APOBEC deaminase comprising a W90Y mutation of rAPOBEC1, or one or more corresponding mutations in another APOBEC deaminase. In some embodiments, an APOBEC deaminase incorporated into a base editor can comprise an APOBEC deaminase comprising a R132E mutation of rAPOBEC1, or one or more corresponding mutations in another APOBEC deaminase. In some embodiments an APOBEC deaminase incorporated into a base editor can comprise an APOBEC deaminase comprising a W90Y and a R126E mutation of rAPOBEC1, or one or more corresponding mutations in another APOBEC deaminase. In some embodiments, an APOBEC deaminase incorporated into a base editor can comprise an APOBEC deaminase comprising a R126E and a R132E mutation of rAPOBEC1, or one or more corresponding mutations in another APOBEC deaminase. In some embodiments, an APOBEC deaminase incorporated into a base editor can comprise an APOBEC deaminase comprising a W90Y and a R132E mutation of rAPOBEC1, or one or more corresponding mutations in another APOBEC deaminase. In some embodiments, an APOBEC deaminase incorporated into a base editor can comprise an APOBEC deaminase comprising a W90Y, R126E, and R132E mutation of rAPOBEC1, or one or more corresponding mutations in another APOBEC deaminase.

[0364] In some embodiments, an APOBEC deaminase incorporated into a base editor can comprise an APOBEC deaminase comprising a D316R and a D317R mutation of hAPOBEC3G, or one or more corresponding mutations in another APOBEC deaminase. In some embodiments, any of the fusion proteins provided herein comprise an APOBEC deaminase comprising a R320A mutation of hAPOBEC3G, or one or more corresponding mutations in another APOBEC deaminase. In some embodiments, an APOBEC deaminase incorporated into a base editor can comprise an APOBEC deaminase comprising a R320E mutation of hAPOBEC3G, or one or more corresponding mutations in another APOBEC deaminase. In some embodiments, an APOBEC deaminase incorporated into a base editor can comprise an APOBEC deaminase comprising a R313A mutation of hAPOBEC3G, or one or more corresponding mutations in another APOBEC deaminase. In some embodiments, an APOBEC deaminase incorporated into a base editor can comprise an APOBEC deaminase comprising a W285A mutation of hAPOBEC3G, or one or more corresponding mutations in another APOBEC deaminase. In some embodiments, an APOBEC deaminase incorporated into a base editor can comprise an APOBEC deaminase comprising a W285Y mutation of hAPOBEC3G, or one or more corresponding mutations in another APOBEC deaminase. In some embodiments, an APOBEC deaminase incorporated into a base editor can comprise an APOBEC deaminase comprising a R326E mutation of hAPOBEC3G, or one or more corresponding mutations in another APOBEC deaminase. In some embodiments, an APOBEC deaminase incorporated into a base editor can comprise an APOBEC deaminase comprising a W285Y and a R320E mutation of hAPOBEC3G, or one or more corresponding mutations in another APOBEC deaminase. In some embodiments, an APOBEC deaminase incorporated into a base editor can comprise an APOBEC deaminase comprising a R320E and a R326E mutation of hAPOBEC3G, or one or more corresponding mutations in another APOBEC deaminase. In some embodiments, an APOBEC deaminase incorporated into a base editor can comprise an APOBEC deaminase comprising a W285Y and a R326E mutation of hAPOBEC3G, or one or more corresponding mutations in another APOBEC deaminase. In some embodiments, an APOBEC deaminase incorporated into a base editor can comprise an APOBEC deaminase comprising a W285Y, R320E, and R326E mutation of hAPOBEC3G, or one or more corresponding mutations in another APOBEC deaminase.

[0365] A number of modified cytidine deaminases are commercially available, including, but not limited to, SaBE3, SaKKH-BE3, VQR-BE3, EQR-BE3, VRER-BE3, YE1-BE3, EE-BE3, YE2-BE3, and YEE-BE3, which are available from Addgene (plasmids 85169, 85170, 85171, 85172, 85173, 85174, 85175, 85176, 85177). In some embodiments, a deaminase incorporated into a base editor comprises all or a portion of an APOBEC1 deaminase.

[0366] Details of C to T nucleobase editing proteins are described in International PCT Application No. PCT/US2016/058344 (WO2017/070632) and Komor, A. C., et al., “Programmable editing of a target base in genomic DNA without double-stranded DNA cleavage” Nature 533, 420-424 (2016), the entire contents of which are hereby incorporated by reference.

### Cytidine Deaminases

[0367] The fusion proteins provided herein comprise one or more cytidine deaminases. In some embodiments, the cytidine deaminases provided herein are capable of deaminating cytosine or 5-methylcytosine to uracil or thymine. In some embodiments, the cytidine deaminases provided herein are capable of deaminating cytosine in DNA. The cytidine deaminase may be derived from any suitable organism. In some embodiments, the cytidine deaminase is a naturally-occurring cytidine deaminase that includes one or more mutations corresponding to any of the mutations provided herein. One of skill in the art will be able to identify the corresponding residue in any homologous protein, e.g., by sequence alignment and determination of homologous residues. Accordingly, one of skill in the art would be able to generate mutations in any naturally-occurring cytidine deaminase that corresponds to any of the mutations described herein. In some embodiments, the cytidine deaminase is from a prokaryote. In some embodiments, the cytidine deaminase is from a bacterium. In some embodiments, the cytidine deaminase is from a mammal (e.g., human).

[0368] In some embodiments, the cytidine deaminase comprises an amino acid sequence that is at least 60%, at least 65%, at least 70%, at least 75%, at least 80%, at least 85%, at least 90%, at least 95%, at least 96%, at least 97%, at least 98%, at least 99%, or at least 99.5% identical to any one of the cytidine deaminase amino acid sequences set forth herein. It should be appreciated that cytidine deaminases provided herein may include one or more mutations (e.g., any of the mutations provided herein). The disclosure provides any deaminase domains with a certain percent identity plus any of the mutations or combinations thereof described herein. In some embodiments, the cytidine deaminase comprises an amino acid sequence that has 1, 2, 3, 4, 5, 6, 7, 8, 9, 10, 11, 12, 13, 14, 15, 16, 17, 18, 19, 20, 21, 22, 21, 24, 25, 26, 27, 28, 29, 30, 31, 32, 33, 34, 35, 36, 37, 38, 39, 40, 41, 42, 43, 44, 45, 46, 47, 48, 49, 50, or more mutations compared to a reference sequence, or any of the cytidine deaminases provided herein. In some embodiments, the cytidine deaminase comprises an amino acid sequence that has at least 5, at least 10, at least 15, at least 20, at least 25, at least 30, at least 35, at least 40, at least 45, at least 50, at least 60, at least 70, at least 80, at least 90, at least 100, at least 110, at least 120, at least 130, at least 140, at least 150, at least 160, or at least 170 identical contiguous amino acid residues as compared to any one of the amino acid sequences known in the art or described herein.

[0369] A fusion protein of the invention comprises two or more nucleic acid editing domains. In some embodiments, the nucleic acid editing domain can catalyze a C to U base change. In some embodiments, the nucleic acid editing domain is a deaminase domain, in particular, two deaminase domains. In some embodiments, the deaminase is a cytidine deaminase and an adenosine deaminase. In some embodiments, the deaminase is a cytidine deaminase or an adenosine deaminase. In some embodiments, the deaminase is an apolipoprotein B mRNA-editing complex (APOBEC) family deaminase. In some embodiments, the deaminase is an APOBEC1 deaminase. In some embodiments, the deaminase is an APOBEC2 deaminase. In some embodiments, the deaminase is an APOBEC3 deaminase. In some embodiments, the deaminase is an APOBEC3 A deaminase. In some embodiments, the deaminase is an APOBEC3B deaminase. In some embodiments, the deaminase is an APOBEC3C deaminase. In some embodiments, the deaminase is an APOBEC3D deaminase. In some embodiments, the deaminase is an APOBEC3E deaminase. In some embodiments, the deaminase is an APOBEC3F deaminase. In some embodiments, the deaminase is an APOBEC3G deaminase. In some embodiments, the deaminase is an APOBEC3H deaminase. In some embodiments, the deaminase is an APOBEC4 deaminase. In some embodiments, the deaminase is an activation-induced deaminase (AID). In some embodiments, the deaminase is a vertebrate deaminase. In some embodiments, the deaminase is an invertebrate deaminase. In some embodiments, the deaminase is a human, chimpanzee, gorilla, monkey, cow, dog, rat, or mouse deaminase. In some embodiments, the deaminase is a human deaminase. In some embodiments, the deaminase is a rat deaminase, e.g., rAPOBEC1. In some embodiments, the deaminase is a Petromyzon marinus cytidine deaminase 1 (pmCDA1). In some embodiments, the deaminase is a human APOBEC3G. In some embodiments, the deaminase is a fragment of the human APOBEC3G. In some embodiments, the deaminase is a human APOBEC3G variant comprising a D316R D317R mutation. In some embodiments, the deaminase is a fragment of the human APOBEC3G and comprises mutations corresponding to the D316R D317R mutations. In some embodiments, the nucleic acid editing domain is at least 80%, at least 85%, at least 90%, at least 92%, at least 95%, at least 96%, at least 97%, at least 98%, at least 99%), or at least 99.5% identical to the deaminase domain of any deaminase described herein.

[0370] In certain embodiments, the fusion proteins provided herein comprise one or more features that improve the base editing activity of the fusion proteins. For example, any of the fusion proteins provided herein may comprise a Cas9 domain that has reduced nuclease activity. In some embodiments, any of the fusion proteins provided herein may have a Cas9 domain that does not have nuclease activity (dCas9), or a Cas9 domain that cuts one strand of a duplexed DNA molecule, referred to as a Cas9 nickase (nCas9).

Cas9 Complexes with Guide RNAs

[0371] Some aspects of this disclosure provide complexes comprising any of the fusion proteins provided herein, and a guide RNA bound to a Cas9 domain (e.g., a dCas9, a nuclease active Cas9, or a Cas9 nickase) of fusion protein. In some embodiments, the guide nucleic acid (e.g., guide RNA) is from 15-100 nucleotides long and comprises a sequence of at least 10 contiguous nucleotides that is complementary to a target sequence. In some embodiments, the guide RNA is 15, 16, 17, 18, 19, 20, 21, 22, 23, 24, 25, 26, 27, 28, 29, 30, 31, 32, 33, 34, 35, 36, 37, 38, 39, 40, 41, 42, 43, 44, 45, 46, 47, 48, 49, or 50 nucleotides long. In some embodiments, the guide RNA comprises a sequence of 15, 16, 17, 18, 19, 20, 21, 22, 23, 24, 25, 26, 27, 28, 29, 30, 31, 32, 33, 34, 35, 36, 37, 38, 39, or 40 contiguous nucleotides that is complementary to a target sequence. In some embodiments, the target sequence is a DNA sequence. In some embodiments, the target sequence is a sequence in the genome of a bacteria, yeast, fungi, insect, plant, or animal. In some embodiments, the target sequence is a sequence in the genome of a human. In some embodiments, the 3′ end of the target sequence is immediately adjacent to a canonical PAM sequence (NGG). In some embodiments, the 3′ end of the target sequence is immediately adjacent to a non-canonical PAM sequence (e.g., a sequence listed in Table 1 or 5′-NAA-3′). In some embodiments, the guide nucleic acid (e.g., guide RNA) is complementary to a sequence in a gene of interest (e.g., a gene associated with a disease or disorder).

[0372] Some aspects of this disclosure provide methods of using the fusion proteins, or complexes provided herein. For example, some aspects of this disclosure provide methods comprising contacting a DNA molecule with any of the fusion proteins provided herein, and with at least one guide RNA, wherein the guide RNA is about 15-100 nucleotides long and comprises a sequence of at least 10 contiguous nucleotides that is complementary to a target sequence. In some embodiments, the 3′ end of the target sequence is immediately adjacent to an AGC, GAG, TTT, GTG, or CAA sequence. In some embodiments, the 3′ end of the target sequence is immediately adjacent to an NGA, NGCG, NGN, NNGRRT, NNNRRT, NGCG, NGCN, NGTN, NGTN, NGTN, or 5′ (TTTV) sequence.

[0373] It will be understood that the numbering of the specific positions or residues in the respective sequences depends on the particular protein and numbering scheme used. Numbering might be different, e.g., in precursors of a mature protein and the mature protein itself, and differences in sequences from species to species may affect numbering. One of skill in the art will be able to identify the respective residue in any homologous protein and in the respective encoding nucleic acid by methods well known in the art, e.g., by sequence alignment and determination of homologous residues.

[0374] It will be apparent to those of skill in the art that in order to target any of the fusion proteins disclosed herein, to a target site, e.g., a site comprising a mutation to be edited, it is typically necessary to co-express the fusion protein together with a guide RNA. As explained in more detail elsewhere herein, a guide RNA typically comprises a tracrRNA framework allowing for Cas9 binding, and a guide sequence, which confers sequence specificity to the Cas9:nucleic acid editing enzyme/domain fusion protein. Alternatively, the guide RNA and tracrRNA may be provided separately, as two nucleic acid molecules. In some embodiments, the guide RNA comprises a structure, wherein the guide sequence comprises a sequence that is complementary to the target sequence. The guide sequence is typically 20 nucleotides long. The sequences of suitable guide RNAs for targeting Cas9:nucleic acid editing enzyme/domain fusion proteins to specific genomic target sites will be apparent to those of skill in the art based on the instant disclosure. Such suitable guide RNA sequences typically comprise guide sequences that are complementary to a nucleic sequence within 50 nucleotides upstream or downstream of the target nucleotide to be edited. Some exemplary guide RNA sequences suitable for targeting any of the provided fusion proteins to specific target sequences are provided herein.

### Additional Domains

[0375] A base editor described herein can include any domain which helps to facilitate the nucleobase editing, modification or altering of a nucleobase of a polynucleotide. In some embodiments, a base editor comprises a polynucleotide programmable nucleotide binding domain (e.g., Cas9), a nucleobase editing domain (e.g., deaminase domain), and one or more additional domains. In some cases, the additional domain can facilitate enzymatic or catalytic functions of the base editor, binding functions of the base editor, or be inhibitors of cellular machinery (e.g., enzymes) that could interfere with the desired base editing result. In some embodiments, a base editor can comprise a nuclease, a nickase, a recombinase, a deaminase, a methyltransferase, a methylase, an acetylase, an acetyltransferase, a transcriptional activator, or a transcriptional repressor domain.

[0376] In some embodiments, a base editor can comprise a uracil glycosylase inhibitor (UGI) domain. A UGI domain can for example improve the efficiency of base editors comprising a cytidine deaminase domain by inhibiting the conversion of a U formed by deamination of a C back to the C nucleobase. In some cases, cellular DNA repair response to the presence of U:G heteroduplex DNA can be responsible for a decrease in nucleobase editing efficiency in cells. In such cases, uracil DNA glycosylase (UDG) can catalyze removal of U from DNA in cells, which can initiate base excision repair (BER), mostly resulting in reversion of the U:G pair to a C:G pair. In such cases, BER can be inhibited in base editors comprising one or more domains that bind the single strand, block the edited base, inhibit UGI, inhibit BER, protect the edited base, and/or promote repairing of the non-edited strand. Thus, this disclosure contemplates a base editor fusion protein comprising a UGI domain.

[0377] In some embodiments, a base editor comprises as a domain all or a portion of a double-strand break (DSB) binding protein. For example, a DSB binding protein can include a Gam protein of bacteriophage Mu that can bind to the ends of DSBs and can protect them from degradation. See Komor, A. C., et al., “Improved base excision repair inhibition and bacteriophage Mu Gam protein yields C:G-to-T:A base editors with higher efficiency and product purity” Science Advances 3:eaao4774 (2017), the entire content of which is hereby incorporated by reference.

[0378] In some embodiments, a base editor can comprise as a domain all or a portion of a nucleic acid polymerase (NAP). For example, a base editor can comprise all or a portion of a eukaryotic NAP. In some embodiments, a NAP or portion thereof incorporated into a base editor is a DNA polymerase. In some embodiments, a NAP or portion thereof incorporated into a base editor has translesion polymerase activity. In some cases, a NAP or portion thereof incorporated into a base editor is a translesion DNA polymerase. In some embodiments, a NAP or portion thereof incorporated into a base editor is a Rev7, Rev1 complex, polymerase iota, polymerase kappa, or polymerase eta. In some embodiments, a NAP or portion thereof incorporated into a base editor is a eukaryotic polymerase alpha, beta, gamma, delta, epsilon, gamma, eta, iota, kappa, lambda, mu, or nu component. In some embodiments, a NAP or portion thereof incorporated into a base editor comprises an amino acid sequence that is at least 75%, 80%, 85%, 90%, 95%, 96%, 97%, 98%, 99%, or 99.5% identical to a nucleic acid polymerase (e.g., a translesion DNA polymerase).

### Base Editor System

[0379] The base editor system provided herein comprises the steps of: (a) contacting a target nucleotide sequence of a polynucleotide (e.g., a double-stranded DNA or RNA, a single-stranded DNA or RNA) of a subject with a base editor system comprising a multi-effector nucleobase editor comprising two or more of an adenosine deaminase domain, a cytidine deaminase domain, and a DNA glycosylase domain, wherein the aforementioned domains are fused to a polynucleotide binding domain, thereby forming a nucleobase editor capable of inducing changes at multiple different bases within a nucleic acid molecule as described herein and at least one guide polynucleic acid (e.g., gRNA), wherein the target nucleotide sequence comprises a targeted nucleobase pair; (b) inducing strand separation of the target region; (c) converting a first nucleobase of the target nucleobase pair in a single strand of the target region to a second nucleobase; and (d) cutting no more than one strand of the target region, where a third nucleobase complementary to the first nucleobase base is replaced by a fourth nucleobase complementary to the second nucleobase. It should be appreciated that in some embodiments, step (b) is omitted. In some embodiments, the targeted nucleobase pair is a plurality of nucleobase pairs in one or more genes. In some embodiments, the base editor system provided herein is capable of multiplex editing of a plurality of nucleobase pairs in one or more genes. In some embodiments, the plurality of nucleobase pairs is located in the same gene. In some embodiments, the plurality of nucleobase pairs is located in one or more genes, wherein at least one gene is located in a different locus.

[0380] In some embodiments, the cut single strand (nicked strand) is hybridized to the guide nucleic acid. In some embodiments, the cut single strand is opposite to the strand comprising the first nucleobase. In some embodiments, the base editor comprises a Cas9 domain. In some embodiments, the first base is adenine, and the second base is not a G, C, A, or T. In some embodiments, the second base is inosine.

[0381] Base editing system as provided herein provides a new approach to genome editing that uses a fusion protein containing a catalytically defective Streptococcus pyogenes Cas9, a cytidine deaminase, and an inhibitor of base excision repair to induce programmable, single nucleotide (C→T or A→G) changes in DNA without generating double-strand DNA breaks, without requiring a donor DNA template, and without inducing an excess of stochastic insertions and deletions.

[0382] Provided herein are systems, compositions, and methods for editing a nucleobase using a base editor system. In some embodiments, the base editor system comprises a base editor (BE) comprising a polynucleotide programmable nucleotide binding domain and one or more, e.g., two, nucleobase editing domains (e.g., two deaminase domains) for editing the nucleobase; and a guide polynucleotide (e.g., guide RNA) in conjunction with the polynucleotide programmable nucleotide binding domain. In some embodiments, the base editor system comprises a base editor (BE) comprising a polynucleotide programmable nucleotide binding domain and one or more, e.g., two, nucleobase editing domains (e.g., two deaminase domains, same or different) for editing the nucleobase; and a guide polynucleotide (e.g., guide RNA) in conjunction with the polynucleotide programmable nucleotide binding domain. In some embodiments, the base editor system comprises a cytosine base editor (CBE) and an adenosine base editor (ABE). In some embodiments, the polynucleotide programmable nucleotide binding domain is a polynucleotide programmable DNA binding domain. In some embodiments, the polynucleotide programmable nucleotide binding domain is a polynucleotide programmable RNA binding domain. In some embodiments, the nucleobase editing domain includes one or more, e.g., two, deaminase domains. In some cases, a deaminase domain can be a cytosine deaminase or a cytidine deaminase and an adenine deaminase or an adenosine deaminase. In some embodiments, the terms “cytosine deaminase” and “cytidine deaminase” can be used interchangeably. In some embodiments, the terms “adenine deaminase” and “adenosine deaminase” can be used interchangeably. In some cases, a deaminase domain can be a cytosine deaminase or a cytidine deaminase. In some cases, a deaminase domain can be an adenine deaminase or an adenosine deaminase. Details of nucleobase editing proteins are described in International PCT Application Nos. PCT/2017/045381 (WO2018/027078) and PCT/US2016/058344 (WO2017/070632), each of which is incorporated herein by reference for its entirety. Also see Komor, A. C., et al., “Programmable editing of a target base in genomic DNA without double-stranded DNA cleavage” Nature 533, 420-424 (2016); Gaudelli, N. M., et al., “Programmable base editing of A•T to G•C in genomic DNA without DNA cleavage” Nature 551, 464-471 (2017); and Komor, A. C., et al., “Improved base excision repair inhibition and bacteriophage Mu Gam protein yields C:G-to-T:A base editors with higher efficiency and product purity” Science Advances 3:eaao4774 (2017), the entire contents of which are hereby incorporated by reference.

[0383] In some embodiments, a nucleobase editor system may comprise more than one base editing component. For example, as described herein, a nucleobase editor system may include more than one deaminase. In some embodiments, a nuclease base editor system may include one or more cytidine deaminase and/or one or more adenosine deaminases. In some embodiments, a single guide polynucleotide may be utilized to target different deaminases to a target nucleic acid sequence. In some embodiments, a single pair of guide polynucleotides may be utilized to target different deaminases to a target nucleic acid sequence.

[0384] The nucleobase components and the polynucleotide programmable nucleotide binding component of a base editor system may be associated with each other covalently or non-covalently. For example, in some embodiments, the deaminase domains can be targeted to a target nucleotide sequence by a polynucleotide programmable nucleotide binding domain. In some embodiments, a polynucleotide programmable nucleotide binding domain can be fused or linked to a deaminase domain. In some embodiments, a polynucleotide programmable nucleotide binding domain can target a deaminase domain to a target nucleotide sequence by non-covalently interacting with or associating with the deaminase domain. For example, in some embodiments, the nucleobase editing component, e.g., the deaminase component can comprise an additional heterologous portion or domain that is capable of interacting with, associating with, or capable of forming a complex with an additional heterologous portion or domain that is part of a polynucleotide programmable nucleotide binding domain. In some embodiments, the additional heterologous portion may be capable of binding to, interacting with, associating with, or forming a complex with a polypeptide. In some embodiments, the additional heterologous portion may be capable of binding to, interacting with, associating with, or forming a complex with a polynucleotide. In some embodiments, the additional heterologous portion may be capable of binding to a guide polynucleotide. In some embodiments, the additional heterologous portion may be capable of binding to a polypeptide linker. In some embodiments, the additional heterologous portion may be capable of binding to a polynucleotide linker. The additional heterologous portion may be a protein domain. In some embodiments, the additional heterologous portion may be a K Homology (KH) domain, a MS2 coat protein domain, a PP7 coat protein domain, a SfMu Com coat protein domain, a steril alpha motif, a telomerase Ku binding motif and Ku protein, a telomerase Sm7 binding motif and Sm7 protein, or a RNA recognition motif.

[0385] A base editor system may further comprise a guide polynucleotide component. It should be appreciated that components of the base editor system may be associated with each other via covalent bonds, noncovalent interactions, or any combination of associations and interactions thereof. In some embodiments, a deaminase domain can be targeted to a target nucleotide sequence by a guide polynucleotide. For example, in some embodiments, the nucleobase editing component of the base editor system, e.g., the deaminase component, can comprise an additional heterologous portion or domain (e.g., polynucleotide binding domain such as an RNA or DNA binding protein) that is capable of interacting with, associating with, or capable of forming a complex with a portion or segment (e.g., a polynucleotide motif) of a guide polynucleotide. In some embodiments, the additional heterologous portion or domain (e.g., polynucleotide binding domain such as an RNA or DNA binding protein) can be fused or linked to the deaminase domain. In some embodiments, the additional heterologous portion may be capable of binding to, interacting with, associating with, or forming a complex with a polypeptide. In some embodiments, the additional heterologous portion may be capable of binding to, interacting with, associating with, or forming a complex with a polynucleotide. In some embodiments, the additional heterologous portion may be capable of binding to a guide polynucleotide. In some embodiments, the additional heterologous portion may be capable of binding to a polypeptide linker. In some embodiments, the additional heterologous portion may be capable of binding to a polynucleotide linker. The additional heterologous portion may be a protein domain. In some embodiments, the additional heterologous portion may be a K Homology (KH) domain, a MS2 coat protein domain, a PP7 coat protein domain, a SfMu Com coat protein domain, a sterile alpha motif, a telomerase Ku binding motif and Ku protein, a telomerase Sm7 binding motif and Sm7 protein, or a RNA recognition motif.

[0386] In some embodiments, a base editor system can further comprise an inhibitor of base excision repair (BER) component. It should be appreciated that components of the base editor system may be associated with each other via covalent bonds, noncovalent interactions, or any combination of associations and interactions thereof. The inhibitor of BER component may comprise a base excision repair inhibitor. In some embodiments, the inhibitor of base excision repair can be a uracil DNA glycosylase inhibitor (UGI). In some embodiments, the inhibitor of base excision repair can be an inosine base excision repair inhibitor. In some embodiments, the inhibitor of base excision repair can be targeted to the target nucleotide sequence by the polynucleotide programmable nucleotide binding domain. In some embodiments, a polynucleotide programmable nucleotide binding domain can be fused or linked to an inhibitor of base excision repair. In some embodiments, a polynucleotide programmable nucleotide binding domain can be fused or linked to a deaminase domain and an inhibitor of base excision repair. In some embodiments, a polynucleotide programmable nucleotide binding domain can target an inhibitor of base excision repair to a target nucleotide sequence by non-covalently interacting with or associating with the inhibitor of base excision repair. For example, in some embodiments, the inhibitor of base excision repair component can comprise an additional heterologous portion or domain that is capable of interacting with, associating with, or capable of forming a complex with an additional heterologous portion or domain that is part of a polynucleotide programmable nucleotide binding domain. In some embodiments, the inhibitor of base excision repair can be targeted to the target nucleotide sequence by the guide polynucleotide. For example, in some embodiments, the inhibitor of base excision repair can comprise an additional heterologous portion or domain (e.g., polynucleotide binding domain such as an RNA or DNA binding protein) that is capable of interacting with, associating with, or capable of forming a complex with a portion or segment (e.g., a polynucleotide motif) of a guide polynucleotide. In some embodiments, the additional heterologous portion or domain of the guide polynucleotide (e.g., polynucleotide binding domain such as an RNA or DNA binding protein) can be fused or linked to the inhibitor of base excision repair. In some embodiments, the additional heterologous portion may be capable of binding to, interacting with, associating with, or forming a complex with a polynucleotide. In some embodiments, the additional heterologous portion may be capable of binding to a guide polynucleotide. In some embodiments, the additional heterologous portion may be capable of binding to a polypeptide linker. In some embodiments, the additional heterologous portion may be capable of binding to a polynucleotide linker. The additional heterologous portion may be a protein domain. In some embodiments, the additional heterologous portion may be a K Homology (KH) domain, a MS2 coat protein domain, a PP7 coat protein domain, a SfMu Com coat protein domain, a sterile alpha motif, a telomerase Ku binding motif and Ku protein, a telomerase Sm7 binding motif and Sm7 protein, or a RNA recognition motif.

[0387] In some embodiments, the base editor inhibits base excision repair of the edited strand. In some embodiments, the base editor protects or binds the non-edited strand. In some embodiments, the base editor comprises UGI activity. In some embodiments, the base editor comprises a catalytically inactive inosine-specific nuclease. In some embodiments, the base editor comprises nickase activity. In some embodiments, the intended edit of base pair is upstream of a PAM site. In some embodiments, the intended edit of base pair is 1, 2, 3, 4, 5, 6, 7, 8, 9, 10, 11, 12, 13, 14, 15, 16, 17, 18, 19, or 20 nucleotides upstream of the PAM site. In some embodiments, the intended edit of base-pair is downstream of a PAM site. In some embodiments, the intended edited base pair is 1, 2, 3, 4, 5, 6, 7, 8, 9, 10, 11, 12, 13, 14, 15, 16, 17, 18, 19, or 20 nucleotides downstream stream of the PAM site.

[0388] In some embodiments, the method does not require a canonical (e.g., NGG) PAM site. In some embodiments, the nucleobase editor comprises a linker or a spacer. In some embodiments, the linker or spacer is 1-25 amino acids in length. In some embodiments, the linker or spacer is 5-20 amino acids in length. In some embodiments, the linker or spacer is 10, 11, 12, 13, 14, 15, 16, 17, 18, 19, or 20 amino acids in length.

[0389] In some embodiments, the target region comprises a target window, wherein the target window comprises the target nucleobase pair. In some embodiments, the target window comprises 1-10 nucleotides. In some embodiments, the target window is 1, 2, 3, 4, 5, 6, 7, 8, 9, 10, 11, 12, 13, 14, 15, 16, 17, 18, 19, or 20 nucleotides in length. In some embodiments, the intended edit of base pair is within the target window. In some embodiments, the target window comprises the intended edit of base pair. In some embodiments, the method is performed using any of the base editors provided herein. In some embodiments, a target window is a deamination window.

[0390] In some embodiments, non-limiting exemplary cytidine base editors (CBE) include BE1 (APOBEC1-XTEN-dCas9), BE2 (APOBEC1-XTEN-dCas9-UGI), BE3 (APOBEC1-XTEN-dCas9(A840H)-UGI), BE3-Gam, saBE3, saBE4-Gam, BE4, BE4-Gam, saBE4, or saB4E-Gam. BE4 extends the APOBEC1-Cas9n(D10A) linker to 32 amino acids and the Cas9n-UGI linker to 9 amino acids, and appends a second copy of UGI to the C-terminus of the construct with another 9-amino acid linker into a single base editor construct. The base editors saBE3 and saBE4 have the S. pyogenes Cas9n(D10A) replaced with the smaller S. aureus Cas9n(D10A). BE3-Gam, saBE3-Gam, BE4-Gam, and saBE4-Gam have 174 residues of Gam protein fused to the N-terminus of BE3, saBE3, BE4, and saBE4 via the 16 amino acid XTEN linker.

[0391] In some embodiments, the adenosine base editor (ABE) can deaminate adenine in DNA. In some embodiments, ABE is generated by replacing APOBEC1 component of BE3 with natural or engineered E. coli TadA, human ADAR2, mouse ADA, or human ADAT2. In some embodiments, ABE comprises evolved TadA variant. In some embodiments, the ABE is ABE 1.2 (TadA*-XTEN-nCas9-NLS). In some embodiments, TadA* comprises A106V and D108N mutations.

[0392] In some embodiments, the ABE is a second-generation ABE. In some embodiments, the ABE is ABE2.1, which comprises additional mutations D147Y and E155V in TadA* (TadA*2.1). In some embodiments, the ABE is ABE2.2, ABE2.1 fused to catalytically inactivated version of human alkyl adenine DNA glycosylase (AAG with E125Q mutation). In some embodiments, the ABE is ABE2.3, ABE2.1 fused to catalytically inactivated version of E. coli Endo V (inactivated with D35A mutation). In some embodiments, the ABE is ABE2.6 which has a linker twice as long (32 amino acids, (SGGS)₂-XTEN-(SGGS)₂) as the linker in ABE2.1. In some embodiments, the ABE is ABE2.7, which is ABE2.1 tethered with an additional wild-type TadA monomer. In some embodiments, the ABE is ABE2.8, which is ABE2.1 tethered with an additional TadA*2.1 monomer. In some embodiments, the ABE is ABE2.9, which is a direct fusion of evolved TadA (TadA*2.1) to the N-terminus of ABE2.1. In some embodiments, the ABE is ABE2.10, which is a direct fusion of wild type TadA to the N-terminus of ABE2.1. In some embodiments, the ABE is ABE2.11, which is ABE2.9 with an inactivating E59A mutation at the N-terminus of TadA* monomer. In some embodiments, the ABE is ABE2.12, which is ABE2.9 with an inactivating E59A mutation in the internal TadA* monomer.

[0393] In some embodiments, the ABE is a third generation ABE. In some embodiments, the ABE is ABE3.1, which is ABE2.3 with three additional TadA mutations (L84F, H123Y, and I157F).

[0394] In some embodiments, the ABE is a fourth generation ABE. In some embodiments, the ABE is ABE4.3, which is ABE3.1 with an additional TadA mutation A142N (TadA*4.3).

[0395] In some embodiments, the ABE is a fifth generation ABE. In some embodiments, the ABE is ABE5.1, which is generated by importing a consensus set of mutations from surviving clones (H36L, R51L, S146C, and K157N) into ABE3.1. In some embodiments, the ABE is ABE5.3, which has a heterodimeric construct containing wild-type E. coli TadA fused to an internal evolved TadA*. In some embodiments, the ABE is ABE5.2, ABE5.4, ABE5.5, ABE5.6, ABE5.7, ABE5.8, ABE5.9, ABE5.10, ABE5.11, ABE5.12, ABE5.13, or ABE5.14, as shown in below Table 6. In some embodiments, the ABE is a sixth generation ABE. In some embodiments, the ABE is ABE6.1, ABE6.2, ABE6.3, ABE6.4, ABE6.5, or ABE6.6, as shown in below Table 6. In some embodiments, the ABE is a seventh generation ABE. In some embodiments, the ABE is ABE7.1, ABE7.2, ABE7.3, ABE7.4, ABE7.5, ABE7.6, ABE7.7, ABE7.8, ABE 7.9, or ABE7.10, as shown in Table 6 below.

TABLE 6
Genotypes of ABEs

| | 23 | 26 | 36 | 37 | 48 | 49 | 51 | 72 | 84 | 87 | 105 | 108 | 123 | 125 | 142 | 145 | 147 | 152 | 155 | 156 | 157 | 16 |
|---|---|---|---|---|---|---|---|---|---|---|---|---|---|---|---|---|---|---|---|---|---|---|
| ABE0.1 | W | R | H | N | P | | R | N | L | S | A | D | H | G | A | S | D | R | E | I | K | K |
| ABE0.2 | W | R | H | N | P | | R | N | L | S | A | D | H | G | A | S | D | R | E | I | K | K |
| ABE1.1 | W | R | H | N | P | | R | N | L | S | A | N | H | G | A | S | D | R | E | I | K | K |
| ABE1.2 | W | R | H | N | P | | R | N | L | S | V | N | H | G | A | S | D | R | E | I | K | K |
| ABE2.1 | W | R | H | N | P | | R | N | L | S | V | N | H | G | A | S | Y | R | V | I | K | K |
| ABE2.2 | W | R | H | N | P | | R | N | L | S | V | N | H | G | A | S | Y | R | V | I | K | K |
| ABE2.3 | W | R | H | N | P | | R | N | L | S | V | N | H | G | A | S | Y | R | V | I | K | K |
| ABE2.4 | W | R | H | N | P | | R | N | L | S | V | N | H | G | A | S | Y | R | V | I | K | K |
| ABE2.5 | W | R | H | N | P | | R | N | L | S | V | N | H | G | A | S | Y | R | V | I | K | K |
| ABE2.6 | W | R | H | N | P | | R | N | L | S | V | N | H | G | A | S | Y | R | V | I | K | K |
| ABE2.7 | W | R | H | N | P | | R | N | L | S | V | N | H | G | A | S | Y | R | V | I | K | K |
| ABE2.8 | W | R | H | N | P | | R | N | L | S | V | N | H | G | A | S | Y | R | V | I | K | K |
| ABE2.9 | W | R | H | N | P | | R | N | L | S | V | N | H | G | A | S | Y | R | V | I | K | K |
| ABE2.10 | W | R | H | N | P | | R | N | L | S | V | N | H | G | A | S | Y | R | V | I | K | K |
| ABE2.11 | W | R | H | N | P | | R | N | L | S | V | N | H | G | A | S | Y | R | V | I | K | K |
| ABE2.12 | W | R | H | N | P | | R | N | L | S | V | N | H | G | A | S | Y | R | V | I | K | K |
| ABE3.1 | W | R | H | N | P | | R | N | F | S | V | N | Y | G | A | S | Y | R | V | F | K | K |
| ABE3.2 | W | R | H | N | P | | R | N | F | S | V | N | Y | G | A | S | Y | R | V | F | K | K |
| ABE3.3 | W | R | H | N | P | | R | N | F | S | V | N | Y | G | A | S | Y | R | V | F | K | K |
| ABE3.4 | W | R | H | N | P | | R | N | F | S | V | N | Y | G | A | S | Y | R | V | F | K | K |
| ABE3.5 | W | R | H | N | P | | R | N | F | S | V | N | Y | G | A | S | Y | R | V | F | K | K |
| ABE3.6 | W | R | H | N | P | | R | N | F | S | V | N | Y | G | A | S | Y | R | V | F | K | K |
| ABE3.7 | W | R | H | N | P | | R | N | F | S | V | N | Y | G | A | S | Y | R | V | F | K | K |
| ABE3.8 | W | R | H | N | P | | R | N | F | S | V | N | Y | G | A | S | Y | R | V | F | K | K |
| ABE4.1 | W | R | H | N | P | | R | N | L | S | V | N | H | G | N | S | Y | R | V | I | K | K |
| ABE4.2 | W | G | H | N | P | | R | N | L | S | V | N | H | G | N | S | Y | R | V | I | K | K |
| ABE4.3 | W | R | H | N | P | | R | N | F | S | V | N | Y | G | N | S | Y | R | V | F | K | K |
| ABE5.1 | W | R | L | N | P | | L | N | F | S | V | N | Y | G | A | C | Y | R | V | F | N | K |
| ABE5.2 | W | R | H | S | P | | R | N | F | S | V | N | Y | G | A | S | Y | R | V | F | K | T |
| ABE5.3 | W | R | L | N | P | | L | N | I | S | V | N | Y | G | A | C | Y | R | V | I | N | K |
| ABE5.4 | W | R | H | S | P | | R | N | F | S | V | N | Y | G | A | S | Y | R | V | F | K | T |
| ABE5.5 | W | R | L | N | P | | L | N | F | S | V | N | Y | G | A | C | Y | R | V | F | N | K |
| ABE5.6 | W | R | L | N | P | | L | N | F | S | V | N | Y | G | A | C | Y | R | V | F | N | K |
| ABE5.7 | W | R | L | N | P | | L | N | F | S | V | N | Y | G | A | C | Y | R | V | F | N | K |
| ABE5.8 | W | R | L | N | P | | L | N | F | S | V | N | Y | G | A | C | Y | R | V | F | N | K |
| ABE5.9 | W | R | L | N | P | | L | N | F | S | V | N | Y | G | A | C | Y | R | V | F | N | K |
| ABE5.10 | W | R | L | N | P | | L | N | F | S | V | N | Y | G | A | C | Y | R | V | F | N | K |
| ABE5.11 | W | R | L | N | P | | L | N | F | S | V | N | Y | G | A | C | Y | R | V | F | N | K |
| ABE5.12 | W | R | L | N | P | | L | N | F | S | V | N | Y | G | A | C | Y | R | V | F | N | K |
| ABE5.13 | W | R | H | N | P | | L | D | F | S | V | N | Y | A | A | S | Y | R | V | F | K | K |
| ABE5.14 | W | R | H | N | S | | L | N | F | C | V | N | Y | G | A | S | Y | R | V | F | K | K |
| ABE6.1 | W | R | H | N | S | | L | N | F | S | V | N | Y | G | N | S | Y | R | V | F | K | K |
| ABE6.2 | W | R | H | N | T | V | L | N | F | S | V | N | Y | G | N | S | Y | R | V | F | N | K |
| ABE6.3 | W | R | L | N | S | | L | N | F | S | V | N | Y | G | A | C | Y | R | V | F | N | K |
| ABE6.4 | W | R | L | N | S | | L | N | F | S | V | N | Y | G | N | C | Y | R | V | F | N | K |
| ABE6.5 | W | R | L | N | I | V | L | N | F | S | V | N | Y | G | A | C | Y | R | V | F | N | K |
| ABE6.6 | W | R | L | N | T | V | L | N | F | S | V | N | Y | G | N | C | Y | R | V | F | N | K |
| ABE7.1 | W | R | L | N | A | | L | N | F | S | V | N | Y | G | A | C | Y | R | V | F | N | K |
| ABE7.2 | W | R | L | N | A | | L | N | F | S | V | N | Y | G | N | C | Y | R | V | F | N | K |
| ABE7.3 | I | R | L | N | A | | L | N | F | S | V | N | Y | G | A | C | Y | R | V | F | N | K |
| ABE7.4 | R | R | L | N | A | | L | N | F | S | V | N | Y | G | A | C | Y | R | V | F | N | K |
| ABE7.5 | W | R | L | N | A | | L | N | F | S | V | N | Y | G | A | C | Y | H | V | F | N | K |
| ABE7.6 | W | R | L | N | A | | L | N | I | S | V | N | Y | G | A | C | Y | P | V | I | N | K |
| ABE7.7 | L | R | L | N | A | | L | N | F | S | V | N | Y | G | A | C | Y | P | V | F | N | K |
| ABE7.8 | I | R | L | N | A | | L | N | F | S | V | N | Y | G | N | C | Y | R | V | F | N | K |
| ABE7.9 | L | R | L | N | A | | L | N | F | S | V | N | Y | G | N | C | Y | P | V | F | N | K |
| ABE7.10 | R | R | L | N | A | | L | N | F | S | V | N | Y | G | A | C | Y | P | V | F | N | K |

[0396] In some embodiments, the base editor further comprises a domain comprising all or a portion of a uracil glycosylase inhibitor (UGI). In some embodiments, the base editor comprises a domain comprising all or a portion of a uracil binding protein (UBP), such as a uracil DNA glycosylase (UDG). In some embodiments, the base editor comprises a domain comprising all or a portion of a nucleic acid polymerase. In some embodiments, a nucleic acid polymerase or portion thereof incorporated into a base editor is a translesion DNA polymerase.

[0397] In some embodiments, a domain of the base editor can comprise multiple domains. For example, the base editor comprising a polynucleotide programmable nucleotide binding domain derived from Cas9 can comprise an REC lobe and an NUC lobe corresponding to the REC lobe and NUC lobe of a wild-type or natural Cas9. In another example, the base editor can comprise one or more of a RuvCI domain, BH domain, REC1 domain, REC2 domain, RuvCII domain, L1 domain, HNH domain, L2 domain, RuvCIII domain, WED domain, TOPO domain or CTD domain. In some embodiments, one or more domains of the base editor comprise a mutation (e.g., substitution, insertion, deletion) relative to a wild type version of a polypeptide comprising the domain. For example, an HNH domain of a polynucleotide programmable DNA binding domain can comprise an H840A substitution. In another example, a RuvCI domain of a polynucleotide programmable DNA binding domain can comprise a D10A substitution.

[0398] Different domains (e.g., adjacent domains) of the base editor disclosed herein can be connected to each other with or without the use of one or more linker domains (e.g., an XTEN linker domain). In some embodiments, a linker domain can be a bond (e.g., covalent bond), chemical group, or a molecule linking two molecules or moieties, e.g., two domains of a fusion protein, such as, for example, a first domain (e.g., Cas9-derived domain) and a second domain (e.g., an adenosine deaminase domain or a cytidine deaminase domain). In some embodiments, a linker is a covalent bond (e.g., a carbon-carbon bond, disulfide bond, carbon-hetero atom bond, etc.). In certain embodiments, a linker is a carbon nitrogen bond of an amide linkage. In certain embodiments, a linker is a cyclic or acyclic, substituted or unsubstituted, branched or unbranched aliphatic or heteroaliphatic linker. In certain embodiments, a linker is polymeric (e.g., polyethylene, polyethylene glycol, polyamide, polyester, etc.). In certain embodiments, a linker comprises a monomer, dimer, or polymer of aminoalkanoic acid. In some embodiments, a linker comprises an aminoalkanoic acid (e.g., glycine, ethanoic acid, alanine, beta-alanine, 3-aminopropanoic acid, 4-aminobutanoic acid, 5-pentanoic acid, etc.). In some embodiments, a linker comprises a monomer, dimer, or polymer of aminohexanoic acid (Ahx). In certain embodiments, a linker is based on a carbocyclic moiety (e.g., cyclopentane, cyclohexane). In other embodiments, a linker comprises a polyethylene glycol moiety (PEG). In certain embodiments, a linker comprises an aryl or heteroaryl moiety. In certain embodiments, the linker is based on a phenyl ring. A linker can include functionalized moieties to facilitate attachment of a nucleophile (e.g., thiol, amino) from the peptide to the linker. Any electrophile can be used as part of the linker. Exemplary electrophiles include, but are not limited to, activated esters, activated amides, Michael acceptors, alkyl halides, aryl halides, acyl halides, and isothiocyanates. In some embodiments, a linker joins a gRNA binding domain of an RNA-programmable nuclease, including a Cas9 nuclease domain, and the catalytic domain of a nucleic acid editing protein. In some embodiments, a linker joins a dCas9 and a second domain (e.g., UGI, cytidine deaminase, etc.).

[0399] Typically, a linker is positioned between, or flanked by, two groups, molecules, or other moieties and connected to each one via a covalent bond, thus connecting the two. In some embodiments, a linker is an amino acid or a plurality of amino acids (e.g., a peptide or protein). In some embodiments, a linker is an organic molecule, group, polymer, or chemical moiety. In some embodiments, a linker is 2-100 amino acids in length, for example, 2, 3, 4, 5, 6, 7, 8, 9, 10, 11, 12, 13, 14, 15, 16, 17, 18, 19, 20, 21, 22, 23, 24, 25, 26, 27, 28, 29, 30, 30-35, 35-40, 40-45, 45-50, 50-60, 60-70, 70-80, 80-90, 90-100, 100-150, or 150-200 amino acids in length. In some embodiments, the linker is about 3 to about 104 (e.g., 5, 6, 7, 8, 9, 10, 11, 12, 13, 14, 15, 16, 17, 18, 19, 20, 21, 22, 23, 24, 25, 26, 27, 28, 29, 30, 31, 32, 33, 34, 35, 36, 37, 38, 39, 40, 41, 42, 43, 44, 45, 46, 47, 48, 49, 50, 55, 60, 65, 70, 75, 80, 85, 90, 95, or 100) amino acids in length. Longer or shorter linkers are also contemplated. In some embodiments, a linker domain comprises the amino acid sequence SGSETPGTSESATPES, which can also be referred to as the XTEN linker. Any method for linking the fusion protein domains can be employed (e.g., ranging from very flexible linkers of the form (SGGS)n, (GGGS)n, (GGGGS)n, and (G)n, to more rigid linkers of the form (EAAAK)n, (GGS)n, SGSETPGTSESATPES (see, e.g., Guilinger J P, Thompson D B, Liu D R. Fusion of catalytically inactive Cas9 to FokI nuclease improves the specificity of genome modification. Nat. Biotechnol. 2014; 32(6): 577-82; the entire contents are incorporated herein by reference), or (XP)n motif, in order to achieve the optimal length for activity for the nucleobase editor. In some embodiments, n is 1, 2, 3, 4, 5, 6, 7, 8, 9, 10, 11, 12, 13, 14, or 15. In some embodiments, the linker comprises a (GGS)n motif, wherein n is 1, 3, or 7. In some embodiments, the Cas9 domain of the fusion proteins provided herein are fused via a linker comprising the amino acid sequence SGSETPGTSESATPES. In some embodiments, a linker comprises a plurality of proline residues and is 5-21, 5-14, 5-9, 5-7 amino acids in length, e.g., PAPAP, PAPAPA, PAPAPAP, PAPAPAPA, P(AP)4, P(AP)7, P(AP)10 (see, e.g., Tan J, Zhang F, Karcher D, Bock R. Engineering of high-precision base editors for site-specific single nucleotide replacement. Nat Commun. 2019 Jan. 25; 10(1):439; the entire contents are incorporated herein by reference). Such proline-rich linkers are also termed “rigid” linkers.

### Linkers

[0400] In certain embodiments, linkers may be used to link any of the peptides or peptide domains of the invention. The linker may be as simple as a covalent bond, or it may be a polymeric linker many atoms in length. In certain embodiments, the linker is a polypeptide or based on amino acids. In other embodiments, the linker is not peptide-like. In certain embodiments, the linker is a covalent bond (e.g., a carbon-carbon bond, disulfide bond, carbon-heteroatom bond, etc.). In certain embodiments, the linker is a carbon-nitrogen bond of an amide linkage. In certain embodiments, the linker is a cyclic or acyclic, substituted or unsubstituted, branched or unbranched aliphatic or heteroaliphatic linker. In certain embodiments, the linker is polymeric (e.g., polyethylene, polyethylene glycol, polyamide, polyester, etc.). In certain embodiments, the linker comprises a monomer, dimer, or polymer of aminoalkanoic acid. In certain embodiments, the linker comprises an aminoalkanoic acid (e.g., glycine, ethanoic acid, alanine, beta-alanine, 3-aminopropanoic acid, 4-aminobutanoic acid, 5-pentanoic acid, etc.). In certain embodiments, the linker comprises a monomer, dimer, or polymer of aminohexanoic acid (Ahx). In certain embodiments, the linker is based on a carbocyclic moiety (e.g., cyclopentane, cyclohexane). In other embodiments, the linker comprises a polyethylene glycol moiety (PEG). In other embodiments, the linker comprises amino acids. In certain embodiments, the linker comprises a peptide. In certain embodiments, the linker comprises an aryl or heteroaryl moiety. In certain embodiments, the linker is based on a phenyl ring. The linker may include functionalized moieties to facilitate attachment of a nucleophile (e.g., thiol, amino) from the peptide to the linker. Any electrophile may be used as part of the linker. Exemplary electrophiles include, but are not limited to, activated esters, activated amides, Michael acceptors, alkyl halides, aryl halides, acyl halides, and isothiocyanates.

[0401] In some embodiments, the linker is an amino acid or a plurality of amino acids (e.g., a peptide or protein). In some embodiments, the linker is a bond (e.g., a covalent bond), an organic molecule, group, polymer, or chemical moiety. In some embodiments, the linker is about 3 to about 104 (e.g., 5, 6, 7, 8, 9, 10, 11, 12, 13, 14, 15, 16, 17, 18, 19, 20, 21, 22, 23, 24, 25, 26, 27, 28, 29, 30, 31, 32, 33, 34, 35, 36, 37, 38, 39, 40, 41, 42, 43, 44, 45, 46, 47, 48, 49, 50, 55, 60, 65, 70, 75, 80, 85, 90, 95, or 100) amino acids in length.

[0402] In some embodiments, the cytidine deaminase and adenosine deaminase and the napDNAbp are fused via a linker that is 4, 16, 32, or 104 amino acids in length. In some embodiments, the linker is about 3 to about 104 amino acids in length. In some embodiments, any of the fusion proteins provided herein, comprise a cytidine deaminase, adenosine deaminase and a Cas9 domain that are fused to each other via a linker. Various linker lengths and flexibilities between the cytidine deaminase and adenosine deaminase domains (e.g., an engineered ecTadA) and the Cas9 domain can be employed (e.g., ranging from very flexible linkers of the form (GGGS)ₙ, (GGGGS)ₙ, and (G)ₙ to more rigid linkers of the form (EAAAK)ₙ, (SGGS)ₙ, SGSETPGTSESATPES (see, e.g., Guilinger J P, Thompson D B, Liu D R. Fusion of catalytically inactive Cas9 to FokI nuclease improves the specificity of genome modification. Nat. Biotechnol. 2014; 32(6): 577-82; the entire contents are incorporated herein by reference) and (XP)ₙ) in order to achieve the optimal length for activity for the multi-effector nucleobase editor. In some embodiments, n is 1, 2, 3, 4, 5, 6, 7, 8, 9, 10, 11, 12, 13, 14, or 15. In some embodiments, the linker comprises a (GGS), motif, wherein n is 1, 3, or 7. In some embodiments, the cytidine deaminase and adenosine deaminase and the Cas9 domain of any of the fusion proteins provided herein are fused via a linker (e.g., an XTEN linker) comprising the amino acid sequence SGSETPGTSESATPES.

[0403] In some embodiments, the target region comprises a target window, wherein the target window comprises the target nucleobase pair. In some embodiments, the target window comprises 1-10 nucleotides. In some embodiments, the target window is 1, 2, 3, 4, 5, 6, 7, 8, 9, 10, 11, 12, 13, 14, 15, 16, 17, 18, 19, or 20 nucleotides in length. In some embodiments, the intended edit of base pair is within the target window. In some embodiments, the target window comprises the intended edit of base pair. In some embodiments, the method is performed using any of the base editors provided herein. In some embodiments, a target window is a deamination window.

[0404] Additionally, in some cases, a Gam protein can be fused to an N terminus of a base editor. In some cases, a Gam protein can be fused to a C-terminus of a base editor. The Gam protein of bacteriophage Mu can bind to the ends of double strand breaks (DSBs) and protect them from degradation. In some embodiments, using Gam to bind the free ends of DSB can reduce indel formation during the process of base editing. In some embodiments, 174-residue Gam protein is fused to the N terminus of the base editors. See. Komor, A. C., et al., “Improved base excision repair inhibition and bacteriophage Mu Gam protein yields C:G-to-T:A base editors with higher efficiency and product purity” Science Advances 3:eaao4774 (2017). In some cases, a mutation or mutations can change the length of a base editor domain relative to a wild type domain. For example, a deletion of at least one amino acid in at least one domain can reduce the length of the base editor. In another case, a mutation or mutations do not change the length of a domain relative to a wild type domain. For example, substitution(s) in any domain does/do not change the length of the base editor.

[0405] In some embodiments, the base editing fusion proteins provided herein need to be positioned at a precise location, for example, where a target base is placed within a defined region (e.g., a “deamination window”). In some cases, a target can be within a 4 base region. In some cases, such a defined target region can be approximately 15 bases upstream of the PAM. See Komor, A. C., et al., “Programmable editing of a target base in genomic DNA without double-stranded DNA cleavage” Nature 533, 420-424 (2016); Gaudelli, N. M., et al., “Programmable base editing of A•T to G•C in genomic DNA without DNA cleavage” Nature 551, 464-471 (2017); and Komor, A. C., et al., “Improved base excision repair inhibition and bacteriophage Mu Gam protein yields C:G-to-T:A base editors with higher efficiency and product purity” Science Advances 3:eaao4774 (2017), the entire contents of which are hereby incorporated by reference.

[0406] A defined target region can be a deamination window. A deamination window can be the defined region in which a base editor acts upon and deaminates a target nucleotide. In some embodiments, the deamination window is within a 2, 3, 4, 5, 6, 7, 8, 9, or 10 base regions. In some embodiments, the deamination window is 5, 6, 7, 8, 9, 10, 11, 12, 13, 14, 15, 16, 17, 18, 19, 20, 21, 22, 23, 24, or 25 bases upstream of the PAM.

[0407] The base editors of the present disclosure can comprise any domain, feature or amino acid sequence which facilitates the editing of a target polynucleotide sequence. For example, in some embodiments, the base editor comprises a nuclear localization sequence (NLS). In some embodiments, an NLS of the base editor is localized between a deaminase domain and a polynucleotide programmable nucleotide binding domain. In some embodiments, an NLS of the base editor is localized C-terminal to a polynucleotide programmable nucleotide binding domain.

[0408] Other exemplary features that can be present in a base editor as disclosed herein are localization sequences, such as cytoplasmic localization sequences, export sequences, such as nuclear export sequences, or other localization sequences, as well as sequence tags that are useful for solubilization, purification, or detection of the fusion proteins. Suitable protein tags provided herein include, but are not limited to, biotin carboxylase carrier protein (BCCP) tags, myc-tags, calmodulin-tags, FLAG-tags, hemagglutinin (HA)-tags, polyhistidine tags, also referred to as histidine tags or His-tags, maltose binding protein (MBP)-tags, nus-tags, glutathione-S-transferase (GST)-tags, green fluorescent protein (GFP)-tags, thioredoxin-tags, S-tags, Softags (e.g., Softag 1, Softag 3), strep-tags, biotin ligase tags, FlAsH tags, V5 tags, and SBP-tags. Additional suitable sequences will be apparent to those of skill in the art. In some embodiments, the fusion protein comprises one or more His tags.

[0409] Non-limiting examples of protein domains which can be included in the fusion protein include deaminase domains (e.g., cytidine deaminases and/or adenosine deaminases), a uracil glycosylase inhibitor (UGI) domain, epitope tags, reporter gene sequences, and/or protein domains having one or more of the following activities: methylase activity, demethylase activity, transcription activation activity, transcription repression activity, transcription release factor activity, histone modification activity, RNA cleavage activity, and nucleic acid binding activity. Additional domains can be a heterologous functional domain. Such heterologous functional domains can confer a function activity, such as DNA methylation, DNA damage, DNA repair, modification of a target polypeptide associated with target DNA (e.g., a histone, a DNA-binding protein, etc.), leading to, for example, histone methylation, histone acetylation, histone ubiquitination, and the like.

[0410] Other functions conferred can include methyltransferase activity, demethylase activity, deamination activity, dismutase activity, alkylation activity, depurination activity, oxidation activity, pyrimidine dimer forming activity, integrase activity, transposase activity, recombinase activity, polymerase activity, ligase activity, helicase activity, photolyase activity or glycosylase activity, acetyltransferase activity, deacetylase activity, kinase activity, phosphatase activity, ubiquitin ligase activity, deubiquitinating activity, adenylation activity, deadenylation activity, SUMOylating activity, deSUMOylating activity, ribosylation activity, deribosylation activity, myristoylation activity, remodeling activity, protease activity, oxidoreductase activity, transferase activity, hydrolase activity, lyase activity, isomerase activity, synthase activity, synthetase activity, and demyristoylation activity, or any combination thereof.

[0411] Non-limiting examples of epitope tags include histidine (His) tags, V5 tags, FLAG tags, influenza hemagglutinin (HA) tags, Myc tags, VSV-G tags, and thioredoxin (Trx) tags. Examples of reporter genes include, but are not limited to, glutathione-5-transferase (GST), horseradish peroxidase (HRP), chloramphenicol acetyltransferase (CAT) beta-galactosidase, beta-glucuronidase, luciferase, green fluorescent protein (GFP), HcRed, DsRed, cyan fluorescent protein (CFP), yellow fluorescent protein (YFP), and autofluorescent proteins including blue fluorescent protein (BFP). Additional protein sequences can include amino acid sequences that bind DNA molecules or bind other cellular molecules, including but not limited to maltose binding protein (MBP), S-tag, Lex A DNA binding domain (DBD) fusions, GAL4 DNA binding domain fusions, and herpes simplex virus (HSV) BP16 protein fusions.

### Other Nucleobase Editors

[0412] The invention provides for a modular multi-effector nucleobase editor wherein virtually any nucleobase editor known in the art can be inserted into the fusion protein described herein or swapped in for a cytidine deaminase or adenosine deaminase, or both the cytidine deaminase and the adenosine deaminase. In one embodiment, the invention features a multi-effector nucleobase editor comprising an abasic nucleobase editor domain. Abasic nucleobase editors are known in the art and are described, for example, by Kavli et al., EMBO J. 15:3442-3447, 1996, which is incorporated herein by reference.

### Fusion Proteins Comprising a Cas9 Domain, an Adenosine Deaminase, and a Cytidine Deaminase

[0413] Some aspects of the disclosure provide fusion proteins comprising a Cas9 domain or other nucleic acid programmable DNA binding protein and one or more adenosine deaminase domain, cytidine deaminase domain, and/or DNA glycosylase domains. It should be appreciated that the Cas9 domain may be any of the Cas9 domains or Cas9 proteins (e.g., dCas9 or nCas9) provided herein. In some embodiments, any of the Cas9 domains or Cas9 proteins (e.g., dCas9 or nCas9) provided herein may be fused with any of the cytidine deaminases and adenosine deaminases provided herein. The domains of the base editors disclosed herein can be arranged in any order. For example, and without limitation, in some embodiments, the fusion protein comprises the structure:

NH₂-[cytidine deaminase]-[Cas9 domain]-[adenosine deaminase]-COOH;

NH₂-[adenosine deaminase]-[Cas9 domain]-[cytidine deaminase]-COOH;

NH₂-[adenosine deaminase]-[cytidine deaminase]-[Cas9 domain]-COOH;

NH₂-[cytidine deaminase]-[adenosine deaminase]-[Cas9 domain]-COOH;

NH₂-[Cas9 domain]-[adenosine deaminase]-[cytidine deaminase]-COOH; or

NH₂-[Cas9 domain]-[cytidine deaminase]-[adenosine deaminase]-COOH.

[0414] In some embodiments, the fusion proteins comprising a cytidine deaminase, abasic editor, and adenosine deaminase and a napDNAbp (e.g., Cas9 domain) do not include a linker sequence. In some embodiments, a linker is present between the cytidine deaminase and adenosine deaminase domains and the napDNAbp. In some embodiments, the “-” used in the general architecture above indicates the presence of an optional linker. In some embodiments, the cytidine deaminase and adenosine deaminase and the napDNAbp are fused via any of the linkers provided herein. For example, in some embodiments the cytidine deaminase and adenosine deaminase and the napDNAbp are fused via any of the linkers provided below in the section entitled “Linkers”.

[0415] In some embodiments, the general architecture of exemplary Cas9 fusion proteins with a cytidine deaminase, adenosine deaminase and a Cas9 domain comprises any one of the following structures, where NLS is a nuclear localization sequence (e.g., any NLS provided herein), NH₂ is the N-terminus of the fusion protein, and COOH is the C-terminus of the fusion protein.

NH₂-NLS-[cytidine deaminase]-[Cas9 domain]-[adenosine deaminase]-COOH;

NH₂-NLS-[adenosine deaminase]-[Cas9 domain]-[cytidine deaminase]-COOH;

NH₂-NLS-[adenosine deaminase] [cytidine deaminase]-[Cas9 domain]-COOH;

NH₂-NLS-[cytidine deaminase]-[adenosine deaminase]-[Cas9 domain]-COOH;

NH₂-NLS-[Cas9 domain]-[adenosine deaminase]-[cytidine deaminase]-COOH;

NH₂-NLS-[Cas9 domain]-[cytidine deaminase]-[adenosine deaminase]-COOH;

NH₂-[cytidine deaminase]-[Cas9 domain]-[adenosine deaminase]-NLS-COOH;

NH₂-[adenosine deaminase]-[Cas9 domain]-[cytidine deaminase]-NL2-COOH;

NH₂-[adenosine deaminase] [cytidine deaminase]-[Cas9 domain]-NLS-COOH;

NH₂-[cytidine deaminase]-[adenosine deaminase]-[Cas9 domain]-NLS-COOH;

NH₂-[Cas9 domain]-[adenosine deaminase]-[cytidine deaminase]-NLS-COOH; or

NH₂-[Cas9 domain]-[cytidine deaminase]-[adenosine deaminase]-NLS-COOH.

[0416] In some embodiments, the NLS is present in a linker or the NLS is flanked by linkers, for example described herein. In some embodiments, the N-terminus or C-terminus NLS is a bipartite NLS. A bipartite NLS comprises two basic amino acid clusters, which are separated by a relatively short spacer sequence (hence bipartite—2 parts, while monopartite NLSs are not). The NLS of nucleoplasmin, KR[PAATKKAGQA]KKKK, is the prototype of the ubiquitous bipartite signal: two clusters of basic amino acids, separated by a spacer of about 10 amino acids. The sequence of an exemplary bipartite NLS follows: PKKKRKVEGADKRTADGSEFES PKKKRKV.

[0417] In some embodiments, the fusion proteins comprising a cytidine deaminase, adenosine deaminase, a Cas9 domain and an NLS do not comprise a linker sequence. In some embodiments, linker sequences between one or more of the domains or proteins (e.g., cytidine deaminase, adenosine deaminase, Cas9 domain or NLS) are present.

[0418] It should be appreciated that the fusion proteins of the present disclosure may comprise one or more additional features. For example, in some embodiments, the fusion protein may comprise inhibitors, cytoplasmic localization sequences, export sequences, such as nuclear export sequences, or other localization sequences, as well as sequence tags that are useful for solubilization, purification, or detection of the fusion proteins. Suitable protein tags provided herein include, but are not limited to, biotin carboxylase carrier protein (BCCP) tags, myc-tags, calmodulin-tags, FLAG-tags, hemagglutinin (HA)-tags, polyhistidine tags, also referred to as histidine tags or His-tags, maltose binding protein (MBP)-tags, nus-tags, glutathione-S-transferase (GST)-tags, green fluorescent protein (GFP)-tags, thioredoxin-tags, S-tags, Softags (e.g., Softag 1, Softag 3), strep-tags, biotin ligase tags, FlAsH tags, V5 tags, and SBP-tags. Additional suitable sequences will be apparent to those of skill in the art. In some embodiments, the fusion protein comprises one or more His tags.

### Base Editor Efficiency

[0419] CRISPR-Cas9 nucleases have been widely used to mediate targeted genome editing. In most genome editing applications, Cas9 forms a complex with a guide polynucleotide (e.g., single guide RNA (sgRNA)) and induces a double-stranded DNA break (DSB) at the target site specified by the sgRNA sequence. Cells primarily respond to this DSB through the non-homologous end-joining (NHEJ) repair pathway, which results in stochastic insertions or deletions (indels) that can cause frameshift mutations that disrupt the gene. In the presence of a donor DNA template with a high degree of homology to the sequences flanking the DSB, gene correction can be achieved through an alternative pathway known as homology directed repair (HDR). Unfortunately, under most non-perturbative conditions, HDR is inefficient, dependent on cell state and cell type, and dominated by a larger frequency of indels. As most of the known genetic variations associated with human disease are point mutations, methods that can more efficiently and cleanly make precise point mutations are needed. Base editing systems as provided herein provide a new way to provide genome editing without generating double-strand DNA breaks, without requiring a donor DNA template, and without inducing an excess of stochastic insertions and deletions.

[0420] The base editors provided herein are capable of modifying a specific nucleotide base without generating a significant proportion of indels. The term “indel(s)”, as used herein, refers to the insertion or deletion of a nucleotide base within a nucleic acid. Such insertions or deletions can lead to frame shift mutations within a coding region of a gene. In some embodiments, it is desirable to generate base editors that efficiently modify (e.g., mutate or deaminate) a specific nucleotide within a nucleic acid, without generating a large number of insertions or deletions (i.e., indels) in the target nucleotide sequence. In certain embodiments, any of the base editors provided herein are capable of generating a greater proportion of intended modifications (e.g., point mutations or deaminations) versus indels.

[0421] In some embodiments, any of base editor systems provided herein result in less than 50%, less than 40%, less than 30%, less than 20%, less than 19%, less than 18%, less than 17%, less than 16%, less than 15%, less than 14%, less than 13%, less than 12%, less than 11%, less than 10%, less than 9%, less than 8%, less than 7%, less than 6%, less than 5%, less than 4%, less than 3%, less than 2%, less than 1%, less than 0.9%, less than 0.8%, less than 0.7%, less than 0.6%, less than 0.5%, less than 0.4%, less than 0.3%, less than 0.2%, less than 0.1%, less than 0.09%, less than 0.08%, less than 0.07%, less than 0.06%, less than 0.05%, less than 0.04%, less than 0.03%, less than 0.02%, or less than 0.01% indel formation in the target polynucleotide sequence.

[0422] Some aspects of the disclosure are based on the recognition that any of the base editors provided herein are capable of efficiently generating an intended mutation, such as a point mutation, in a nucleic acid (e.g., a nucleic acid within a genome of a subject) without generating a significant number of unintended mutations, such as unintended point mutations. In some embodiments, any of the base editors provided herein are capable of generating at least 0.01% of intended mutations (i.e. at least 0.01% base editing efficiency). In some embodiments, any of the base editors provided herein are capable of generating at least 0.01%, 1%, 2%, 3%, 4%, 5%, 10%, 15%, 20%, 25%, 30%, 40%, 45%, 50%, 60%, 70%, 80%, 90%, 95%, or 99% of intended mutations.

[0423] In some embodiments, the base editors provided herein are capable of generating a ratio of intended point mutations to indels that is greater than 1:1. In some embodiments, the base editors provided herein are capable of generating a ratio of intended point mutations to indels that is at least 1.5:1, at least 2:1, at least 2.5:1, at least 3:1, at least 3.5:1, at least 4:1, at least 4.5:1, at least 5:1, at least 5.5:1, at least 6:1, at least 6.5:1, at least 7:1, at least 7.5:1, at least 8:1, at least 8.5:1, at least 9:1, at least 10:1, at least 11:1, at least 12:1, at least 13:1, at least 14:1, at least 15:1, at least 20:1, at least 25:1, at least 30:1, at least 40:1, at least 50:1, at least 100:1, at least 200:1, at least 300:1, at least 400:1, at least 500:1, at least 600:1, at least 700:1, at least 800:1, at least 900:1, or at least 1000:1, or more.

[0424] The number of intended mutations and indels can be determined using any suitable method, for example, as described in International PCT Application Nos. PCT/2017/045381 (WO2018/027078) and PCT/US2016/058344 (WO2017/070632); Komor, A. C., et al., “Programmable editing of a target base in genomic DNA without double-stranded DNA cleavage” Nature 533, 420-424 (2016); Gaudelli, N. M., et al., “Programmable base editing of A•T to G•C in genomic DNA without DNA cleavage” Nature 551, 464-471 (2017); and Komor, A. C., et al., “Improved base excision repair inhibition and bacteriophage Mu Gam protein yields C:G-to-T:A base editors with higher efficiency and product purity” Science Advances 3:eaao4774 (2017); the entire contents of which are hereby incorporated by reference.

[0425] In some embodiments, to calculate indel frequencies, sequencing reads are scanned for exact matches to two 10-bp sequences that flank both sides of a window in which indels can occur. If no exact matches are located, the read is excluded from analysis. If the length of this indel window exactly matches the reference sequence the read is classified as not containing an indel. If the indel window is two or more bases longer or shorter than the reference sequence, then the sequencing read is classified as an insertion or deletion, respectively. In some embodiments, the base editors provided herein can limit formation of indels in a region of a nucleic acid. In some embodiments, the region is at a nucleotide targeted by a base editor or a region within 2, 3, 4, 5, 6, 7, 8, 9, or 10 nucleotides of a nucleotide targeted by a base editor.

[0426] The number of indels formed at a target nucleotide region can depend on the amount of time a nucleic acid (e.g., a nucleic acid within the genome of a cell) is exposed to a base editor. In some embodiments, the number or proportion of indels is determined after at least 1 hour, at least 2 hours, at least 6 hours, at least 12 hours, at least 24 hours, at least 36 hours, at least 48 hours, at least 3 days, at least 4 days, at least 5 days, at least 7 days, at least 10 days, or at least 14 days of exposing the target nucleotide sequence (e.g., a nucleic acid within the genome of a cell) to a base editor. It should be appreciated that the characteristics of the base editors as described herein can be applied to any of the fusion proteins, or methods of using the fusion proteins provided herein.

### Multiplex Editing

[0427] In some embodiments, the base editor system provided herein is capable of multiplex editing of a plurality of nucleobase pairs in one or more genes. In some embodiments, the plurality of nucleobase pairs is located in the same gene. In some embodiments, the plurality of nucleobase pairs is located in one or more gene, wherein at least one gene is located in a different locus. In some embodiments, the multiplex editing can comprise one or more guide polynucleotides. In some embodiments, the multiplex editing can comprise one or more base editor system. In some embodiments, the multiplex editing can comprise one or more base editor systems with a single guide polynucleotide. In some embodiments, the multiplex editing can comprise one or more base editor system with a plurality of guide polynucleotides. In some embodiments, the multiplex editing can comprise one or more guide polynucleotide with a single base editor system. In some embodiments, the multiplex editing can comprise at least one guide polynucleotide that does not require a PAM sequence to target binding to a target polynucleotide sequence. In some embodiments, the multiplex editing can comprise at least one guide polynucleotide that requires a PAM sequence to target binding to a target polynucleotide sequence. In some embodiments, the multiplex editing can comprise a mix of at least one guide polynucleotide that does not require a PAM sequence to target binding to a target polynucleotide sequence and at least one guide polynucleotide that require a PAM sequence to target binding to a target polynucleotide sequence. It should be appreciated that the characteristics of the multiplex editing using any of the base editors as described herein can be applied to any of combination of the methods of using any of the base editor provided herein. It should also be appreciated that the multiplex editing using any of the base editors as described herein can comprise a sequential editing of a plurality of nucleobase pairs.

[0428] In some embodiments, the plurality of nucleobase pairs are in one more genes. In some embodiments, the plurality of nucleobase pairs is in the same gene. In some embodiments, at least one gene in the one more genes is located in a different locus.

[0429] In some embodiments, the editing is editing of the plurality of nucleobase pairs in at least one protein coding region. In some embodiments, the editing is editing of the plurality of nucleobase pairs in at least one protein non-coding region. In some embodiments, the editing is editing of the plurality of nucleobase pairs in at least one protein coding region and at least one protein non-coding region.

[0430] In some embodiments, the editing is in conjunction with one or more guide polynucleotides. In some embodiments, the base editor system can comprise one or more base editor system. In some embodiments, the base editor system can comprise one or more base editor systems in conjunction with a single guide polynucleotide. In some embodiments, the base editor system can comprise one or more base editor system in conjunction with a plurality of guide polynucleotides. In some embodiments, the editing is in conjunction with one or more guide polynucleotide with a single base editor system. In some embodiments, the editing is in conjunction with at least one guide polynucleotide that does not require a PAM sequence to target binding to a target polynucleotide sequence. In some embodiments, the editing is in conjunction with at least one guide polynucleotide that require a PAM sequence to target binding to a target polynucleotide sequence. In some embodiments, the editing is in conjunction with a mix of at least one guide polynucleotide that does not require a PAM sequence to target binding to a target polynucleotide sequence and at least one guide polynucleotide that require a PAM sequence to target binding to a target polynucleotide sequence. It should be appreciated that the characteristics of the multiplex editing using any of the base editors as described herein can be applied to any of combination of the methods of using any of the base editors provided herein. It should also be appreciated that the editing can comprise a sequential editing of a plurality of nucleobase pairs.

### Methods of Using Base Editors

### Methods of Using Fusion Proteins Comprising a Cytidine Deaminase, Adenosine Deaminase and a Cas9 Domain

[0431] Methods of using the fusion proteins, or complexes (e.g., multi-effector base editors) are provided herein. For example, some aspects of this disclosure provide methods comprising contacting a DNA molecule with any of the fusion proteins provided herein, and with at least one guide RNA, wherein the guide RNA is about 15-100 nucleotides long and comprises a sequence of at least 10 contiguous nucleotides that is complementary to a target sequence. In some embodiments, the 3′ end of the target sequence is immediately adjacent to a canonical PAM sequence (NGG). In some embodiments, the 3′ end of the target sequence is not immediately adjacent to a canonical PAM sequence (NGG). In some embodiments, the 3′ end of the target sequence is immediately adjacent to an AGC, GAG, TTT, GTG, or CAA sequence. In some embodiments, the 3′ end of the target sequence is immediately adjacent to an NGA, NGCG, NGN, NNGRRT, NNNRRT, NGCG, NGCN, NGTN, NGTN, NGTN, or 5′ (TTTV) sequence.

[0432] In some embodiments, a fusion protein of the invention is used for mutagenizing a target of interest. In particular, a multi-effector nucleobase editor described herein is capable of making multiple mutations within a target sequence. These mutations may affect the function of the target. For example, when a multi-effector nucleobase editor is used to target a regulatory region, the function of the regulatory region is altered and the expression of the downstream protein is reduced.

[0433] In some embodiments, the purpose of the methods provided herein is to restore the function of a dysfunctional gene via genome editing. The multi-effector nucleobase editor fusion proteins provided herein can be validated for gene editing-based human therapeutics in vitro, e.g., by correcting a disease-associated mutation in a polynucleotide (gene) sequence in human cell culture. It will be understood by the skilled artisan that the fusion proteins provided herein, e.g., the fusion proteins comprising a Cas9 domain, a cytidine deaminase, and adenosine deaminase domain may be used, for example, to correct any single point mutation, such as a G to T or C to A mutation.

[0434] It will be appreciated that the numbering of the specific positions or residues in the respective sequences depends on the particular protein and numbering scheme used. Numbering might be different, e.g., in precursors of a mature protein and the mature protein itself, and differences in sequences from species to species may affect numbering. One of skill in the art will be able to identify the respective residue in any homologous protein and in the respective encoding nucleic acid by methods well known in the art, e.g., by sequence alignment and determination of homologous residues.

[0435] It will be apparent to those of skill in the art that in order to target any of the fusion proteins comprising a Cas9 domain and a cytidine deaminase and adenosine deaminase, as disclosed herein, to a target site, e.g., a site comprising a mutation to be edited, it is typically necessary to co-express the fusion protein together with a guide RNA, e.g., an sgRNA. As explained in more detail elsewhere herein, a guide RNA typically comprises a tracrRNA framework allowing for Cas9 binding, and a guide sequence, which confers sequence specificity to the Cas9:nucleic acid editing enzyme/domain fusion protein. Alternatively, the guide RNA and tracrRNA may be provided separately, as two nucleic acid molecules. In some embodiments, the guide RNA comprises a structure, wherein the guide sequence comprises a sequence that is complementary to the target sequence. Without intending to be limiting, the guide sequence is typically 20 nucleotides long. The sequences of suitable guide RNAs for targeting Cas9:nucleic acid editing enzyme/domain fusion proteins to specific genomic target sites will be apparent to those of skill in the art based on the instant disclosure. Such suitable guide RNA sequences typically comprise guide sequences that are complementary to a nucleic sequence within 50 nucleotides upstream or downstream of the target nucleotide to be edited. Some exemplary guide RNA sequences suitable for targeting any of the provided fusion proteins to specific target sequences are provided herein.

[0436] Methods for Editing Nucleic Acids

[0437] Some aspects of the disclosure provide methods for editing a nucleic acid. In some embodiments, the method is a method for editing a nucleobase of a nucleic acid (e.g., a base pair of a double-stranded DNA sequence). In some embodiments, the method comprises the steps of: a) contacting a target region of a nucleic acid (e.g., a double-stranded DNA sequence) with a complex comprising a base editor (e.g., a Cas9 domain fused to a cytidine deaminase and adenosine deaminase) and a guide nucleic acid (e.g., gRNA), wherein the target region comprises a targeted nucleobase pair, b) inducing strand separation of said target region, c) converting a first nucleobase of said target nucleobase pair in a single strand of the target region to a second nucleobase, and d) cutting no more than one strand of said target region, where a third nucleobase complementary to the first nucleobase base is replaced by a fourth nucleobase complementary to the second nucleobase. In some embodiments, the method results in less than 20% indel formation in the nucleic acid. It should be appreciated that in some embodiments, step b is omitted. In some embodiments, the method results in less than 19%, 18%, 16%, 14%, 12%, 10%, 8%, 6%, 4%, 2%, 1%, 0.5%, 0.2%, or less than 0.1% indel formation. In some embodiments, the method further comprises replacing the second nucleobase with a fifth nucleobase that is complementary to the fourth nucleobase, thereby generating an intended edited base pair (e.g., G•C to A•T). In some embodiments, at least 5% of the intended base pairs are edited. In some embodiments, at least 10%, 15%, 20%, 25%, 30%, 35%, 40%, 45%, or 50% of the intended base pairs are edited.

[0438] In some embodiments, the ratio of intended products to unintended products in the target nucleotide is at least 2:1, 5:1, 10:1, 20:1, 30:1, 40:1, 50:1, 60:1, 70:1, 80:1, 90:1, 100:1, or 200:1, or more. In some embodiments, the ratio of intended mutation to indel formation is greater than 1:1, 10:1, 50:1, 100:1, 500:1, or 1000:1, or more. In some embodiments, the cut single strand (nicked strand) is hybridized to the guide nucleic acid. In some embodiments, the cut single strand is opposite to the strand comprising the first nucleobase. In some embodiments, the base editor comprises a Cas9 domain. In some embodiments, the base editor protects or binds the non-edited strand. In some embodiments, the base editor comprises nickase activity. In some embodiments, the intended edited base pair is upstream of a PAM site. In some embodiments, the intended edited base pair is 1, 2, 3, 4, 5, 6, 7, 8, 9, 10, 11, 12, 13, 14, 15, 16, 17, 18, 19, or 20 nucleotides upstream of the PAM site. In some embodiments, the intended edited base pair is downstream of a PAM site. In some embodiments, the intended edited base pair is 1, 2, 3, 4, 5, 6, 7, 8, 9, 10, 11, 12, 13, 14, 15, 16, 17, 18, 19, or 20 nucleotides downstream stream of the PAM site. In some embodiments, the method does not require a canonical (e.g., NGG) PAM site. In some embodiments, the nucleobase editor comprises a linker. In some embodiments, the linker is 1-25 amino acids in length. In some embodiments, the linker is 5-20 amino acids in length. In some embodiments, linker is 10, 11, 12, 13, 14, 15, 16, 17, 18, 19, or 20 amino acids in length. In one embodiment, the linker is 32 amino acids in length. In another embodiment, a “long linker” is at least about 60 amino acids in length. In other embodiments, the linker is between about 3-100 amino acids in length. In some embodiments, the target region comprises a target window, wherein the target window comprises the target nucleobase pair. In some embodiments, the target window comprises 1-10 nucleotides. In some embodiments, the target window is 1-9, 1-8, 1-7, 1-6, 1-5, 1-4, 1-3, 1-2, or 1 nucleotides in length. In some embodiments, the target window is 1, 2, 3, 4, 5, 6, 7, 8, 9, 10, 11, 12, 13, 14, 15, 16, 17, 18, 19, or 20 nucleotides in length. In some embodiments, the intended edited base pair is within the target window. In some embodiments, the target window comprises the intended edited base pair. In some embodiments, the method is performed using any of the base editors provided herein.

[0439] In some embodiments, the disclosure provides methods for editing a nucleotide. In some embodiments, the disclosure provides a method for editing a nucleobase pair of a double-stranded DNA sequence. In some embodiments, the method comprises a) contacting a target region of the double-stranded DNA sequence with a complex comprising a base editor and a guide nucleic acid (e.g., gRNA), where the target region comprises a target nucleobase pair, b) inducing strand separation of said target region, c) converting a first nucleobase of said target nucleobase pair in a single strand of the target region to a second nucleobase, d) cutting no more than one strand of said target region, wherein a third nucleobase complementary to the first nucleobase base is replaced by a fourth nucleobase complementary to the second nucleobase, and the second nucleobase is replaced with a fifth nucleobase that is complementary to the fourth nucleobase, thereby generating an intended edited base pair, wherein the efficiency of generating the intended edited base pair is at least 5%. It should be appreciated that in some embodiments, step b is omitted. In some embodiments, at least 5% of the intended base pairs are edited. In some embodiments, at least 10%, 15%, 20%, 25%, 30%, 35%, 40%, 45%, or 50% of the intended base pairs are edited. In some embodiments, the method causes less than 19%, 18%, 16%, 14%, 12%, 10%, 8%, 6%, 4%, 2%, 1%, 0.5%, 0.2%, or less than 0.1% indel formation. In some embodiments, the ratio of intended product to unintended products at the target nucleotide is at least 2:1, 5:1, 10:1, 20:1, 30:1, 40:1, 50:1, 60:1, 70:1, 80:1, 90:1, 100:1, or 200:1, or more. In some embodiments, the ratio of intended mutation to indel formation is greater than 1:1, 10:1, 50:1, 100:1, 500:1, or 1000:1, or more. In some embodiments, the cut single strand is hybridized to the guide nucleic acid. In some embodiments, the cut single strand is opposite to the strand comprising the first nucleobase. In some embodiments, the nucleobase editor comprises nickase activity. In some embodiments, the intended edited base pair is upstream of a PAM site. In some embodiments, the intended edited base pair is 1, 2, 3, 4, 5, 6, 7, 8, 9, 10, 11, 12, 13, 14, 15, 16, 17, 18, 19, or 20 nucleotides upstream of the PAM site. In some embodiments, the intended edited base pair is downstream of a PAM site. In some embodiments, the intended edited base pair is 1, 2, 3, 4, 5, 6, 7, 8, 9, 10, 11, 12, 13, 14, 15, 16, 17, 18, 19, or 20 nucleotides downstream stream of the PAM site. In some embodiments, the method does not require a canonical (e.g., NGG) PAM site. In some embodiments, the nucleobase editor comprises a linker. In some embodiments, the linker is 1-25 amino acids in length. In some embodiments, the linker is 5-20 amino acids in length. In some embodiments, the linker is 10, 11, 12, 13, 14, 15, 16, 17, 18, 19, or 20 amino acids in length. In some embodiments, the target region comprises a target window, wherein the target window comprises the target nucleobase pair. In some embodiments, the target window comprises 1-10 nucleotides. In some embodiments, the target window is 1-9, 1-8, 1-7, 1-6, 1-5, 1-4, 1-3, 1-2, or 1 nucleotides in length. In some embodiments, the target window is 1, 2, 3, 4, 5, 6, 7, 8, 9, 10, 11, 12, 13, 14, 15, 16, 17, 18, 19, or 20 nucleotides in length. In some embodiments, the intended edited base pair occurs within the target window. In some embodiments, the target window comprises the intended edited base pair. In some embodiments, the nucleobase editor is any one of the base editors provided herein.

### Expression of Fusion Proteins in a Host Cell

[0440] Fusion proteins of the invention may be expressed in virtually any host cell of interest, including, but not limited to, bacteria, yeast, fungi, insects, plants, and animal cells using routine methods known to the skilled artisan. Fusion proteins are generated by operably linking one or more polynucleotides encoding one or more domains having nucleobase modifying activity (e.g., an adenosine deaminase, cytidine deaminase, DNA glycosylase) to a polynucleotide encoding a napDNAbp to prepare a polynucleotide that encodes a fusion protein of the invention. In some embodiments, a polynucleotide encoding a napDNAbp, and a DNA encoding a domain having nucleobase modifying activity may each be fused with a DNA encoding a binding domain or a binding partner thereof, or both DNAs may be fused with a DNA encoding a separation intein, whereby the nucleic acid sequence-recognizing conversion module and the nucleic acid base converting enzyme are translated in a host cell to form a complex. In these cases, a linker and/or a nuclear localization signal can be linked to a suitable position of one of or both DNAs when desired.

[0441] A DNA encoding a protein domain described herein can be obtained by any method known in the art, such as by chemically synthesizing the DNA chain, by PCR, or by the Gibson Assembly method. The advantage of constructing a full-length DNA by chemical synthesis or a combination of PCR method or Gibson Assembly method is that the codons may be optimized to ensure that the fusion protein is expressed at a high level in a host cell. Optimized codons may be selected using the genetic code use frequency database (http://www.kazusa.or.jp/codon/index.html), which is disclosed in the home page of Kazusa DNA Research Institute. Once obtained polynucleotides encoding fusion proteins are incorporated into suitable expression vectors.

[0442] Suitable expression vectors include Escherichia coli-derived plasmids (e.g., pBR322, pBR325, pUC12, pUC13); Bacillus subtilis-derived plasmids (e.g., pUB110, pTP5, pC194); yeast-derived plasmids (e.g., pSH19, pSH15); plasmids suitable for expression in insect cells (e.g., pFast-Bac); plasmids suitable for expression in mammalian cells (e.g., pA1-11, pXT1, pRc/CMV, pRc/RSV, pcDNAI/Neo); also bacteriophages, such as lambda phage and the like; other vectors that may be used include insect viral vectors, such as baculovirus and the like (e.g., BmNPV, AcNPV); and viral vectors suitable for expression in a mammalian cell, such as retrovirus, vaccinia virus, adenovirus and the like.

[0443] Fusion protein encoding polynucleotides are typically expressed under the control of a suitable promoter that is useful for expression in a desired host cell. For example, when the host is an animal cell, any one of the following promoters are used SR alpha promoter, SV40 promoter, LTR promoter, CMV (cytomegalovirus) promoter, RSV (Rous sarcoma virus) promoter, MoMuLV (Moloney mouse leukemia virus) LTR, HSV-TK (simple herpes virus thymidine kinase) promoter and the like are used. In one embodiment, the promoter is CMV promoter or SR alpha promoter. When the host cell is Escherichia coli, any of the following promoters may be used: trp promoter, lac promoter, recA promoter, lambda PL promoter, lpp promoter, T7 promoter and the like. When the host is genus Bacillus, any of the following promoters may be used: SPO1 promoter, SPO2 promoter, penP promoter and the like. When the host is a yeast, any of the following promoters may be used: Gall/10 promoter, PHO5 promoter, PGK promoter, GAP promoter, ADH promoter and the like. When the host is an insect cell, any of the following promoters may be used polyhedrin promoter, P10 promoter and the like. When the host is a plant cell, any of the following promoters may be used: CaMV35S promoter, CaMV19S promoter, NOS promoter and the like.

[0444] If desired, the expression vector also includes any one or more of an enhancer, splicing signal, terminator, polyA addition signal, a selection marker (e.g., a drug resistance gene, auxotrophic complementary gene and the like), or a replication origin.

[0445] An RNA encoding a protein domain described herein can be prepared by, for example, by transcribing an mRNA in an in vitro transcription system.

[0446] A fusion protein of the invention can be expressed by introducing an expression vector encoding a fusion protein into a host cell, and culturing the host cell. Host cells useful in the invention include bacterial cells, yeast, insect cells, mammalian cells and the like.

[0447] The genus Escherichia includes Escherichia coli K12.cndot.DH1 [Proc. Natl. Acad. Sci. USA, 60, 160 (1968)], Escherichia coli JM103 [Nucleic Acids Research, 9, 309 (1981)], Escherichia coli JA221 [Journal of Molecular Biology, 120, 517 (1978)], Escherichia coli HB101 [Journal of Molecular Biology, 41, 459 (1969)], Escherichia coli C600 [Genetics, 39, 440 (1954)] and the like.

[0448] The genus Bacillus includes Bacillus subtilis M1114 [Gene, 24, 255 (1983)], Bacillus subtilis 207-21 [Journal of Biochemistry, 95, 87 (1984)] and the like.

[0449] Yeast useful for expressing fusion proteins of the invention include Saccharomyces cerevisiae AH22, AH22R.sup.-, NA87-11A, DKD-5D, 20B-12, Schizosaccharomyces pombe NCYC1913, NCYC2036, Pichia pastoris KM71 and the like are used.

[0450] Fusion proteins are expressed in insect cells using, for example, viral vectors, such as AcNPV. Insect host cells include any of the following cell lines: cabbage armyworm larva-derived established line (Spodoptera frugiperda cell; Sf cell), MG1 cells derived from the mid-intestine of Trichoplusiani, High Five, cells derived from an egg of Trichoplusiani, Mamestra brassicae-derived cells, Estigmena acrea-derived cells and the like are used. When the virus is BmNPV, cells of a Bombyx mori-derived line (Bombyx mori N cell; BmN cell) and the like are used. Sf cells include, for example, Sf9 cell (ATCC CRL1711), Sf21 cell [all above, In Vivo, 13, 213-217 (1977)] and the like.

[0451] With regard to insects, larva of Bombyx mori, Drosophila, cricket and the like are used to express fusion proteins [Nature, 315, 592 (1985)].

[0452] Mammalian cell lines may be used to express fusion proteins. Such cell lines include monkey COS-7 cell, monkey Vero cell, Chinese hamster ovary (CHO) cell, dhfr gene-deficient CHO cell, mouse L cell, mouse AtT-20 cell, mouse myeloma cell, rat GH3 cell, human FL cell and the like. Pluripotent stem cells, such as iPS cell, ES cell and the like of human and other mammals, and primary cultured cells prepared from various tissues are used. Furthermore, zebrafish embryo, Xenopus oocyte and the like can also be used.

[0453] Plant cells may be maintained in culture using methods well known to the skilled artisan. Plant cell culture involves suspending cultured cells, callus, protoplast, leaf segment, root segment and the like, which are prepared from various plants (e.g., s rice, wheat, corn, tomato, cucumber, eggplant, carnations, Eustoma russellianum, tobacco, Arabidopsis thaliana a.

[0454] All the above-mentioned host cells may be haploid (monoploid), or polyploid (e.g., diploid, triploid, tetraploid and the like.

[0455] Expression vectors encoding a fusion protein of the invention are introduced into host cells using any transfection method (e.g., using lysozyme, PEG, CaCl₂ coprecipitation, electroporation, microinjection, particle gun, lipofection, Agrobacterium and the like). The transfection method is selected based on the host cell to be transfected. Escherichia coli can be transformed according to the methods described in, for example, Proc. Natl. Acad. Sci. USA, 69, 2110 (1972), Gene, 17, 107 (1982) and the like. Methods for transducing the genus Bacillus are described in, for example, Molecular & General Genetics, 168, 111 (1979).

[0456] Yeast cells are transduced using methods described in, for example, Methods in Enzymology, 194, 182-187 (1991), Proc. Natl. Acad. Sci. USA, 75, 1929 (1978) and the like.

[0457] Insect cells are transfected using methods described in, for example, Bio/Technology, 6, 47-55 (1988) and the like.

[0458] Mammalian cells are transfected using methods described in, for example, Cell Engineering additional volume 8, New Cell Engineering Experiment Protocol, 263-267 (1995) (published by Shujunsha), and Virology, 52, 456 (1973).

[0459] Cells comprising expression vectors of the invention are cultured according to known methods, which vary depending on the host.

[0460] For example, when Escherichia coli or genus Bacillus cells are cultured, a liquid medium is used. The medium preferably contains a carbon source, nitrogen source, inorganic substance and other components necessary for the growth of the transformant. Examples of the carbon source include glucose, dextrin, soluble starch, sucrose and the like; examples of the nitrogen source include inorganic or organic substances such as ammonium salts, nitrate salts, corn steep liquor, peptone, casein, meat extract, soybean cake, potato extract and the like; and examples of the inorganic substance include calcium chloride, sodium dihydrogen phosphate, magnesium chloride and the like. The medium may also contain yeast extract, vitamins, growth promoting factors and the like. The pH of the medium is preferably between about 5 to about 8.

[0461] As a medium for culturing Escherichia coli, for example, M9 medium containing glucose, casamino acid [Journal of Experiments in Molecular Genetics, 431-433, Cold Spring Harbor Laboratory, New York 1972] is used. Escherichia coli are cultured at generally about 15- about 43° C. Where necessary, aeration and stirring may be performed.

[0462] The genus Bacillus is cultured at generally about 30 to about 40° C. Where necessary, aeration and stirring is performed.

[0463] Examples of culture media suitable for culturing yeast include Burkholder minimum medium [Proc. Natl. Acad. Sci. USA, 77, 4505 (1980)], SD medium containing 0.5% casamino acid [Proc. Natl. Acad. Sci. USA, 81, 5330 (1984)] and the like. The pH of the medium is preferably about 5- about 8. The culture is performed at generally about 20° C. to about 35° C. Where necessary, aeration and stirring may be performed.

[0464] As a medium for culturing an insect cell or insect, Grace's Insect Medium (Nature, 195, 788 (1962)) containing an additive such as inactivated 10% bovine serum and the like are used. The pH of the medium is preferably about 6.2 to about 6.4. Cells are cultured at about 27° C. Where necessary, aeration and stirring may be performed.

[0465] Mammalian cells are cultured, for example, in any one of minimum essential medium (MEM) containing about 5 to about 20% of fetal bovine serum (Science, 122, 501 (1952)), Dulbecco's modified Eagle medium (DMEM) (Virology, 8, 396 (1959)), RPMI 1640 medium (The Journal of the American Medical Association, 199, 519 (1967)), 199 medium (Proceeding of the Society for the Biological Medicine, 73, 1 (1950)) and the like. The pH of the medium is preferably about 6 to about 8. The culture is performed at about 30° C. to about 40° C. Where necessary, aeration and stirring may be performed.

[0466] As a medium for culturing a plant cell, for example, MS medium, LS medium, B5 medium and the like are used. The pH of the medium is preferably about 5 to about 8. The culture is performed at generally about 20° C. to about 30° C. Where necessary, aeration and stirring may be performed.

[0467] Fusion protein expression may be regulated using an inducible promoter (e.g., metallothionein promoter (induced by heavy metal ion), heat shock protein promoter (induced by heat shock), Tet-ON/Tet-OFF system promoter (induced by addition or removal of tetracycline or a derivative thereof), steroid-responsive promoter (induced by steroid hormone or a derivative thereof, etc.), the inducing agent is added to the medium (or removed from the medium) at an appropriate stage to induce expression of the fusion protein.

[0468] Prokaryotic cells such as Escherichia coli and the like can utilize an inductive promoter. Examples of the inducible promoters include, but are not limited to, lac promoter (induced by IPTG), cspA promoter (induced by cold shock), araBAD promoter (induced by arabinose) and the like.

### Delivery Systems

[0469] Nucleic acids encoding multi-effector nucleobase editors according to the present disclosure can be administered to subjects or delivered into cells by art-known methods or as described herein. For example, multi-effector nucleobase editors can be delivered by, e.g., vectors (e.g., viral or non-viral vectors), non-vector based methods (e.g., using naked DNA or DNA complexes), or a combination thereof.

[0470] A multi-effector nucleobase editor as disclosed herein can be encoded on a nucleic acid that is contained in a viral vector. Exemplary viral vectors include retroviral vectors (e.g., Maloney murine leukemia virus, MML-V), adenoviral vectors (e.g., AD100), lentiviral vectors (e.g., HIV and FIV-based vectors), herpesvirus vectors (e.g., HSV-2), and adeno-associated viral vectors.

### Adeno-Associated Viral Vectors (AAVs)

[0471] Adeno-associated virus (“AAV”) vectors can also be used to transduce cells with target nucleic acids, e.g., in the in vitro production of nucleic acids and peptides, and for in vivo and ex vivo gene therapy procedures (see, e.g., West et al., Virology 160:38-47 (1987); U.S. Pat. No. 4,797,368; WO 93/24641; Kotin, Human Gene Therapy 5:793-801 (1994); Muzyczka, J. Clin. Invest. 94:1351 (1994). Construction of recombinant AAV vectors is described in a number of publications, including U.S. Pat. No. 5,173,414; Tratschin et al., Mol. Cell. Biol. 5:3251-3260 (1985); Tratschin, et al., Mol. Cell. Biol. 4:2072-2081 (1984); Hermonat & Muzyczka, PNAS 81:6466-6470 (1984); and Samulski et al., J. Virol. 63:03822-3828 (1989).

[0472] In terms of in vivo delivery, AAV can be advantageous over other viral vectors. In some embodiments, AAV vectors have low toxicity. Toxicity can occur when the purification methods do not require ultra-centrifugation of cell particles that can activate an immune response. In some embodiments, AAV vectors have a low probability of causing insertional mutagenesis because it does not integrate into the host genome.

[0473] AAV is a small, single-stranded DNA dependent virus belonging to the parvovirus family. The 4.7 kb wild-type (wt) AAV genome is made up of two genes that encode four replication proteins and three capsid proteins, respectively, and is flanked on either side by 145-bp inverted terminal repeats (ITRs). The virion is composed of three capsid proteins, Vp1, Vp2, and Vp3, produced in a 1:1:10 ratio from the same open reading frame but from differential splicing (Vp1) and alternative translational start sites (Vp2 and Vp3, respectively). Vp3 is the most abundant subunit in the virion and participates in receptor recognition at the cell surface thereby defining the tropism of the virus. A phospholipase domain, which contributes to viral infectivity, has been identified in the unique N terminus of Vp1.

[0474] AAV has a packaging limit of 4.5 or 4.75 Kb. Accordingly, a disclosed multi-effector nucleobase editor as well as a promoter and transcription terminator can be harbored in a single viral vector. Constructs larger than 4.5 or 4.75 Kb can lead to significantly reduced virus production. For example, SpCas9 is quite large, the gene itself is over 4.1 Kb, which makes it difficult for packing into AAV. Therefore, embodiments of the present disclosure include utilizing a disclosed base editor which is shorter in length than conventional base editors. In some examples, the base editors are less than 4 kb. Disclosed base editors can be less than 4.5 kb, 4.4 kb, 4.3 kb, 4.2 kb, 4.1 kb, 4 kb, 3.9 kb, 3.8 kb, 3.7 kb, 3.6 kb, 3.5 kb, 3.4 kb, 3.3 kb, 3.2 kb, 3.1 kb, 3 kb, 2.9 kb, 2.8 kb, 2.7 kb, 2.6 kb, 2.5 kb, 2 kb, or 1.5 kb. In some embodiments, the disclosed base editors are 4.5 kb or less in length.

[0475] An AAV can be AAV1, AAV2, AAV5 or any combination thereof. One can select the type of AAV with regard to the cells to be targeted. For example, one can select AAV serotypes 1, 2, 5 or a hybrid capsid AAV1, AAV2, AAV5 or any combination thereof for targeting brain or neuronal cells; and one can select AAV4 for targeting cardiac tissue. AAV8 is useful for delivery to the liver. A tabulation of certain AAV serotypes as to these cells can be found in Grimm, D. et al, J. Virol. 82: 5887-5911 (2008)).

[0476] Similar to wt AAV, recombinant AAV (rAAV) utilizes the cis-acting 145-bp ITRs to flank vector transgene cassettes, providing up to 4.5 kb for packaging of foreign DNA. Subsequent to infection, rAAV can express a fusion protein of the invention and persist without integration into the host genome by existing episomally in circular head-to-tail concatemers. Although there are numerous examples of rAAV success using this system, in vitro and in vivo, the limited packaging capacity has limited the use of AAV-mediated gene delivery when the length of the coding sequence of the gene is equal or greater in size than the wt AAV genome.

[0477] The small packaging capacity of AAV vectors makes the delivery of a number of genes that exceed this size and/or the use of large physiological regulatory elements challenging. These challenges can be addressed, for example, by dividing the protein(s) to be delivered into two or more fragments, using for example a split intein system.

### Inteins

[0478] Inteins (intervening protein) are auto-processing domains found in a variety of diverse organisms, which carry out a process known as protein splicing. Protein splicing is a multi-step biochemical reaction comprised of both the cleavage and formation of peptide bonds. While the endogenous substrates of protein splicing are proteins found in intein-containing organisms, inteins can also be used to chemically manipulate virtually any polypeptide backbone.

[0479] In protein splicing, the intein excises itself out of a precursor polypeptide by cleaving two peptide bonds, thereby ligating the flanking extein (external protein) sequences via the formation of a new peptide bond. This rearrangement occurs post-translationally (or possibly co-translationally). Intein-mediated protein splicing occurs spontaneously, requiring only the folding of the intein domain.

[0480] About 5% of inteins are split inteins, which are transcribed and translated as two separate polypeptides, the N-intein and C-intein, each fused to one extein. Upon translation, the intein fragments spontaneously and non-covalently assemble into the canonical intein structure to carry out protein splicing in trans. The mechanism of protein splicing entails a series of acyl-transfer reactions that result in the cleavage of two peptide bonds at the intein-extein junctions and the formation of a new peptide bond between the N- and C-exteins. This process is initiated by activation of the peptide bond joining the N-extein and the N-terminus of the intein. Virtually all inteins have a cysteine or serine at their N-terminus that attacks the carbonyl carbon of the C-terminal N-extein residue. This N to O/S acyl-shift is facilitated by a conserved threonine and histidine (referred to as the TXXH motif), along with a commonly found aspartate, which results in the formation of a linear (thio)ester intermediate. Next, this intermediate is subject to trans-(thio)esterification by nucleophilic attack of the first C-extein residue (+1), which is a cysteine, serine, or threonine. The resulting branched (thio)ester intermediate is resolved through a unique transformation: cyclization of the highly conserved C-terminal asparagine of the intein. This process is facilitated by the histidine (found in a highly conserved HNF motif) and the penultimate histidine and may also involve the aspartate. This succinimide formation reaction excises the intein from the reactive complex and leaves behind the exteins attached through a non-peptidic linkage. This structure rapidly rearranges into a stable peptide bond in an intein-independent fashion.

[0481] In some embodiments, an N-terminal fragment of a base editor (e.g., ABE, CBE) is fused to a split intein-N and a C-terminal fragment is fused to a split intein-C. These fragments are then packaged into two or more AAV vectors. The use of certain inteins for joining heterologous protein fragments is described, for example, in Wood et al., J. Biol. Chem. 289(21); 14512-9 (2014). For example, when fused to separate protein fragments, the inteins IntN and IntC recognize each other, splice themselves out and simultaneously ligate the flanking N- and C-terminal exteins of the protein fragments to which they were fused, thereby reconstituting a full-length protein from the two protein fragments. Other suitable inteins will be apparent to a person of skill in the art.

[0482] Three regions of spCas9 were selected where the ABE fusion protein was split into N- and C-terminal fragments at Ala, Ser, Thr, or Cys residues within selected regions of SpCas9. These regions correspond to loop regions identified by Cas9 crystal structure analysis. The N-terminus of each fragment was fused to an intein-N and the C-terminus of each fragment was fused to an intein C at amino acid positions S303, T310, T313, S355, A456, S460, A463, T466, S469, T472, T474, C574, S577, A589, and S590, which are indicated in Bold Capitals in the sequence below.

| | |
|---|---|
| 1 | mdkkysigld igtnsvgwav itdeykvpsk kfkvlgntdr |
| | hsikknliga llfdsgetae |
| 61 | atrlkrtarr rytrrknric ylqeifsnem akvddsffhr |
| | leesflveed kkherhpifg |
| 121 | nivdevayhe kyptiyhlrk klvdstdkad lrliylalah |
| | mikfrghfli egdlnpdnsd |
| 181 | vdklfiglvg tynqlfeenp inasgvdaka ilsarlsksr |
| | rlenliaqlp gekknglfgn |
| 241 | lialslgltp nfksnfdlae daklqlskdt ydddldnlla |
| | qigdqyadlf laaknlsdai |
| 301 | llSdilrvnT eiTkaplsas mikrydehhq dltllkalvr |
| | qqlpekykei ffdqSkngya |
| 361 | gyidggasqe efykfikpil ekmdgteell vklnredllr |
| | kqrtfdngsi phqihlgelh |
| 421 | ailrrqedfy pflkdnreki ekiltfripy yvgplArgnS |
| | rfAwmTrkSe eTiTpwnfee |
| 481 | vvdkgasaqs fiermtnfdk nlpnekvlpk hsllyeyftv |
| | yneltkvkyv tegmrkpafl |
| 541 | sgeqkkaivd llfktnrkvt vkqlkedyfk kieCfdSvei |
| | sgvedrfnAS lgtyhdllki |
| 601 | ikdkdfldne enedilediv ltltlfedre mieerlktya |
| | hlfddkvmkg lkrrrytgwg |
| 661 | rlsrklingi rdkqsgktil dflksdgfan rnfmqlihdd |
| | sltfkediqk aqvsgqgdsl |
| 721 | hehianlags paikkgilqt vkvvdelvkv mgrhkpeniv |
| | iemarenqtt qkgqknsrer |
| 781 | mkrieegike lgsqilkehp ventqlqnek lylyylqngr |
| | dmyvdqeldi nrlsdydvdh |
| 841 | ivpqsflkdd sidnkvltrs dknrgksdnv pseevvkkmk |
| | nywrqllnak litqrkfdnl |
| 901 | tkaergglse ldkagfikrq lvetrqitkh vaqildsrmn |
| | tkydendkli revkvitlks |
| 961 | klvsdfrkdf qfykvreinn yhhandayln avvgtalikk |
| | ypklesefvy gdykvydvrk |
| 1021 | miakseqeig katakyffys nimnffktei tlangeirkr |
| | plietngetg eivwdkgrdf |
| 1081 | atvrkvlsmp qvnivkktev qtggfskesi lpkrnsdkli |
| | arkkdwdpkk yggfdsptva |
| 1141 | ysvlvvakve kgkskklksv kellgitime rssfeknpid |
| | fleakgykev kkdliiklpk |
| 1201 | yslfelengr krmlasagel qkgnelalps kyvnflylas |
| | hyeklkgspe dneqkqlfve |
| 1261 | qhkhyldeii eqisefskrv iladanldkv lsaynkhrdk |
| | pireqaenii hlftltnlga |
| 1321 | paafkyfdtt idrkrytstk evldatlihq sitglyetri |
| | dlsqlggd |

[0483] A fragment of a fusion protein of the invention can vary in length. In some embodiments, a protein fragment ranges from 2 amino acids to about 1000 amino acids in length. In some embodiments, a protein fragment ranges from about 5 amino acids to about 500 amino acids in length. In some embodiments, a protein fragment ranges from about 20 amino acids to about 200 amino acids in length. In some embodiments, a protein fragment ranges from about 10 amino acids to about 100 amino acids in length. Suitable protein fragments of other lengths will be apparent to a person of skill in the art.

[0484] In some embodiments, a portion or fragment of a nuclease (e.g., Cas9) is fused to an intein. The nuclease can be fused to the N-terminus or the C-terminus of the intein. In some embodiments, a portion or fragment of a fusion protein is fused to an intein and fused to an AAV capsid protein. The intein, nuclease and capsid protein can be fused together in any arrangement (e.g., nuclease-intein-capsid, intein-nuclease-capsid, capsid-intein-nuclease, etc.). In some embodiments, the N-terminus of an intein is fused to the C-terminus of a fusion protein and the C-terminus of the intein is fused to the N-terminus of an AAV capsid protein.

[0485] In one embodiment, dual AAV vectors are generated by splitting a large transgene expression cassette in two separate halves (5′ and 3′ ends, or head and tail), where each half of the cassette is packaged in a single AAV vector (of <5 kb). The re-assembly of the full-length transgene expression cassette is then achieved upon co-infection of the same cell by both dual AAV vectors followed by: (1) homologous recombination (HR) between 5′ and 3′ genomes (dual AAV overlapping vectors); (2) ITR-mediated tail-to-head concatemerization of 5′ and 3′ genomes (dual AAV trans-splicing vectors); or (3) a combination of these two mechanisms (dual AAV hybrid vectors). The use of dual AAV vectors in vivo results in the expression of full-length proteins. The use of the dual AAV vector platform represents an efficient and viable gene transfer strategy for transgenes of >4.7 kb in size.

### Other Viral Vectors

[0486] The use of RNA or DNA viral based systems for the delivery of a base editor takes advantage of highly evolved processes for targeting a virus to specific cells in culture or in the host and trafficking the viral payload to the nucleus or host cell genome. Viral vectors can be administered directly to cells in culture, patients (in vivo), or they can be used to treat cells in vitro, and the modified cells can optionally be administered to patients (ex vivo). Conventional viral based systems could include retroviral, lentivirus, adenoviral, adeno-associated and herpes simplex virus vectors for gene transfer. Integration in the host genome is possible with the retrovirus, lentivirus, and adeno-associated virus gene transfer methods, often resulting in long term expression of the inserted transgene. Additionally, high transduction efficiencies have been observed in many different cell types and target tissues.

[0487] The disclosed strategies for designing base editors can be useful for generating base editors capable of being packaged into a viral vector. The use of RNA or DNA viral based systems for the delivery of a base editor takes advantage of highly evolved processes for targeting a virus to specific cells in culture or in the host and trafficking the viral payload to the nucleus or host cell genome. Viral vectors can be administered directly to cells in culture, patients (in vivo), or they can be used to treat cells in vitro, and the modified cells can optionally be administered to patients (ex vivo). Conventional viral based systems could include retroviral, lentivirus, adenoviral, adeno-associated and herpes simplex virus vectors for gene transfer. Integration in the host genome is possible with the retrovirus, lentivirus, and adeno-associated virus gene transfer methods, often resulting in long term expression of the inserted transgene. Additionally, high transduction efficiencies have been observed in many different cell types and target tissues.

[0488] The tropism of a retrovirus can be altered by incorporating foreign envelope proteins, expanding the potential target population of target cells. Lentiviral vectors are retroviral vectors that are able to transduce or infect non-dividing cells and typically produce high viral titers. Selection of a retroviral gene transfer system would therefore depend on the target tissue. Retroviral vectors are comprised of cis-acting long terminal repeats with packaging capacity for up to 6-10 kb of foreign sequence. The minimum cis-acting LTRs are sufficient for replication and packaging of the vectors, which are then used to integrate the therapeutic gene into the target cell to provide permanent transgene expression. Widely used retroviral vectors include those based upon murine leukemia virus (MuLV), gibbon ape leukemia virus (GaLV), Simian Immuno deficiency virus (SIV), human immuno deficiency virus (HIV), and combinations thereof (See, e.g., Buchscher et al., J. Virol. 66:2731-2739 (1992); Johann et al., J. Virol. 66:1635-1640 (1992); Sommnerfelt et al., Virol. 176:58-59 (1990); Wilson et al., J. Virol. 63:2374-2378 (1989); Miller et al., J. Virol. 65:2220-2224 (1991); PCT/US94/05700).

[0489] Retroviral vectors, especially lentiviral vectors, can require polynucleotide sequences smaller than a given length for efficient integration into a target cell. For example, retroviral vectors of length greater than 9 kb can result in low viral titers compared with those of smaller size. In some aspects, a base editor of the present disclosure is of sufficient size so as to enable efficient packaging and delivery into a target cell via a retroviral vector. In some cases, a base editor is of a size so as to allow efficient packing and delivery even when expressed together with a guide nucleic acid and/or other components of a targetable nuclease system.

[0490] In applications where transient expression is preferred, adenoviral based systems can be used. Adenoviral based vectors are capable of very high transduction efficiency in many cell types and do not require cell division. With such vectors, high titer and levels of expression have been obtained. This vector can be produced in large quantities in a relatively simple system. Adeno-associated virus (“AAV”) vectors can also be used to transduce cells with target nucleic acids, e.g., in the in vitro production of nucleic acids and peptides, and for in vivo and ex vivo gene therapy procedures (See, e.g., West et al., Virology 160:38-47 (1987); U.S. Pat. No. 4,797,368; WO 93/24641; Kotin, Human Gene Therapy 5:793-801 (1994); Muzyczka, J. Clin. Invest. 94:1351 (1994). The construction of recombinant AAV vectors is described in a number of publications, including U.S. Pat. No. 5,173,414; Tratschin et al., Mol. Cell. Biol. 5:3251-3260 (1985); Tratschin, et al., Mol. Cell. Biol. 4:2072-2081 (1984); Hermonat & Muzyczka, PNAS 81:6466-6470 (1984); and Samulski et al., J. Virol. 63:03822-3828 (1989).

[0491] A multi-effector nucleobase editor described herein can therefore be delivered with viral vectors. One or more components of the base editor system can be encoded on one or more viral vectors. For example, the base editor and guide nucleic acid can be encoded on a single viral vector. In other cases, the base editor and guide nucleic acid are encoded on different viral vectors. In either case, the base editor and guide nucleic acid can each be operably linked to a promoter and terminator.

[0492] The combination of components encoded on a viral vector can be determined by the cargo size constraints of the chosen viral vector.

[0493] Any suitable promoter can be used to drive expression of the base editor and, where appropriate, the guide polynucleotide. For ubiquitous expression, promoters that can be used include promoters for CMV, CAG, CBh, PGK, SV40, Ferritin heavy or light chains, etc. For brain or other CNS cell expression, suitable promoters can include: SynapsinI for all neurons, CaMKIIalpha promoter for excitatory neurons, GAD67, GAD65 or VGAT promoter for GABAergic neurons, etc. For liver cell expression, suitable promoters include the Albumin promoter. For lung cell expression, suitable promoters can include the SP-B promoter. For endothelial cells, suitable promoters can include the ICAM promoter. For hematopoietic cells suitable promoters can include the IFNbeta or CD45 promoter. For Osteoblasts suitable promoters can include the OG-2 promoter.

[0494] A promoter used to drive base editor coding nucleic acid molecule expression can include AAV ITR. This can be advantageous for eliminating the need for an additional promoter element, which can take up space in the vector. The additional space freed up can be used to drive the expression of additional elements, such as a guide nucleic acid or a selectable marker. ITR activity is relatively weak, so it can be used to reduce potential toxicity due to over expression of the chosen nuclease.

[0495] In some embodiments, a base editor of the present disclosure is of small enough size to allow separate promoters to drive expression of the base editor and a compatible guide polynucleotide within the same nucleic acid molecule. For instance, a vector or viral vector can comprise a first promoter operably linked to a nucleic acid encoding the base editor and a second promoter operably linked to the guide nucleic acid.

[0496] The promoter used to drive expression of a guide polynucleotide can include: Pol III promoters such as U6 or H1 Use of Pol II promoter and intronic cassettes to express gRNA

[0497] Adeno Associated Virus (AAV).

[0498] A multi-effector nucleobase editor described herein with or without one or more guide nucleic acids can be delivered using adeno associated virus (AAV), lentivirus, adenovirus or other plasmid or viral vector types, in particular, using formulations and doses from, for example, U.S. Pat. No. 8,454,972 (formulations, doses for adenovirus), U.S. Pat. No. 8,404,658 (formulations, doses for AAV), U.S. Pat. No. 5,846,946 (formulations, doses for DNA plasmids), and from clinical trials and publications regarding the clinical trials involving lentivirus, AAV and adenovirus. For examples, for AAV, the route of administration, formulation and dose can be as in U.S. Pat. No. 8,454,972 and as in clinical trials involving AAV. For Adenovirus, the route of administration, formulation and dose can be as in U.S. Pat. No. 8,404,658 and as in clinical trials involving adenovirus. For plasmid delivery, the route of administration, formulation and dose can be as in U.S. Pat. No. 5,846,946 and as in clinical studies involving plasmids. Doses can be based on or extrapolated to an average 70 kg individual (e.g., a male adult human), and can be adjusted for patients, subjects, mammals of different weight and species. Frequency of administration is within the ambit of the medical or veterinary practitioner (e.g., physician, veterinarian), depending on usual factors including the age, sex, general health, other conditions of the patient or subject and the particular condition or symptoms being addressed. The viral vectors can be injected into the tissue of interest. For cell-type specific base editing, the expression of the base editor and optional guide nucleic acid can be driven by a cell-type specific promoter.

[0499] Lentiviruses are complex retroviruses that have the ability to infect and express their genes in both mitotic and post-mitotic cells. The most commonly known lentivirus is the human immunodeficiency virus (HIV), which uses the envelope glycoproteins of other viruses to target a broad range of cell types.

[0500] Lentiviruses can be prepared as follows. After cloning pCasES10, which contains a lentiviral transfer plasmid backbone, HEK293FT at low passage (p=5) are seeded in a T-75 flask to 50% confluence the day before transfection in DMEM with 10% fetal bovine serum and without antibiotics. After 20 hours, media is changed to OptiMEM (serum-free) media and transfection follows 4 hours later. Cells are transfected with 10 μg of lentiviral transfer plasmid (pCasES10) and the following packaging plasmids: 5 μg of pMD2.G (VSV-g pseudotype), and 7.5 μg of psPAX2 (gag/pol/rev/tat). Transfection can be done in 4 ml OptiMEM with a cationic lipid delivery agent (50 μl Lipofectamine 2000 and 100 μl Plus reagent). After 6 hours, the media is changed to antibiotic-free DMEM with 10% fetal bovine serum. These methods use serum during cell culture, but serum-free methods are preferred. Lentivirus can be purified as follows. Viral supernatants are harvested after 48 hours. Supernatants are first cleared of debris and filtered through a 0.45 μm low protein binding (PVDF) filter. They are then spun in an ultracentrifuge for 2 hours at 24,000 rpm. Viral pellets are resuspended in 50 μl of DMEM overnight at 4° C. They are then aliquoted and immediately frozen at −80° C.

[0501] In another embodiment, minimal non-primate lentiviral vectors based on the equine infectious anemia virus (EIAV) are also contemplated. In another embodiment, RETINOSTAT®, an equine infectious anemia virus-based lentiviral gene therapy vector that expresses angiostatic proteins endostatin and angiostatin that is contemplated to be delivered via a subretinal injection. In another embodiment, use of self-inactivating lentiviral vectors is contemplated.

[0502] Any guide polynucleotide or base editor-encoding polynucleotide, can be delivered to a cell in the form of RNA. Base editor-encoding mRNA can be generated by in vitro transcription. For example, nuclease mRNA can be synthesized using a PCR cassette containing the following elements: T7 promoter, optional Kozak sequence (GCCACC), nuclease sequence, and 3′ UTR such as a 3′ UTR from beta globin-polyA tail. The cassette can be transcribed by T7 polymerase. Guide polynucleotides (e.g., gRNA) can also be transcribed using in vitro transcription from a cassette containing a T7 promoter, followed by the sequence “GG,” and a guide polynucleotide sequence.

[0503] To enhance expression and reduce possible toxicity, the base editor-coding sequence and/or the guide nucleic acid can be modified to include one or more modified nucleosides e.g., a pseudo-U or 5-Methyl-C.

[0504] The disclosure in some embodiments encompasses a method of modifying a cell or organism. The cell can be a prokaryotic cell or a eukaryotic cell. The cell can be a mammalian cell. The mammalian cell many be a non-human primate, bovine, porcine, rodent or mouse cell. The modification introduced to the cell by the base editors, compositions and methods of the present disclosure can be such that the cell and progeny of the cell are altered for improved production of biologic products such as an antibody, starch, alcohol or other desired cellular output. The modification introduced to the cell by the methods of the present disclosure can be such that the cell and progeny of the cell include an alteration that changes the biologic product produced.

[0505] The system can comprise one or more different vectors. In an aspect, the base editor is codon optimized for expression in the desired cell type. In some embodiments, the base editor is expressed in a eukaryotic cell, such as a mammalian cell or a human cell.

[0506] In general, codon optimization refers to a process of modifying a nucleic acid sequence for enhanced expression in the host cells of interest by replacing at least one codon (e.g., about or more than about 1, 2, 3, 4, 5, 10, 15, 20, 25, 50, or more codons) of the native sequence with codons that are more frequently or most frequently used in the genes of that host cell while maintaining the native amino acid sequence. Various species exhibit bias for certain codons of a particular amino acid. Codon bias (differences in codon usage between organisms) often correlates with the efficiency of translation of messenger RNA (mRNA), which is in turn believed to be dependent on, among other things, the properties of the codons being translated and the availability of particular transfer RNA (tRNA) molecules. The predominance of selected tRNAs in a cell is generally a reflection of the codons used most frequently in peptide synthesis. Accordingly, genes can be tailored for optimal gene expression in a given organism based on codon optimization. Codon usage tables are readily available, for example, at the “Codon Usage Database” available at www.kazusa.orjp/codon/ (visited Jul. 9, 2002), and these tables can be adapted in a number of ways. See Nakamura, Y., et al. “Codon usage tabulated from the international DNA sequence databases: status for the year 2000” Nucl. Acids Res. 28:292 (2000). Computer algorithms for codon optimizing a particular sequence for expression in a particular host cell are also available, such as Gene Forge (Aptagen; Jacobus, Pa.), are also available. In some embodiments, one or more codons (e.g., 1, 2, 3, 4, 5, 10, 15, 20, 25, 50, or more, or all codons) in a sequence encoding an engineered nuclease correspond to the most frequently used codon for a particular amino acid.

[0507] Packaging cells are typically used to form virus particles that are capable of infecting a host cell. Such cells include 293 cells, which package adenovirus, and psi.2 cells or PA317 cells, which package retrovirus. Viral vectors used in gene therapy are usually generated by producing a cell line that packages a nucleic acid vector into a viral particle. The vectors typically contain the minimal viral sequences required for packaging and subsequent integration into a host, with other viral sequences being replaced by an expression cassette for the polynucleotide(s) to be expressed. The missing viral functions are typically supplied in trans by the packaging cell line. For example, AAV vectors used in gene therapy typically only possess ITR sequences from the AAV genome that are required for packaging and integration into the host genome. Viral DNA can be packaged in a cell line, which contains a helper plasmid encoding the other AAV genes, namely rep and cap, but lacking ITR sequences. The cell line can also be infected with adenovirus as a helper. The helper virus can promote replication of the AAV vector and expression of AAV genes from the helper plasmid. The helper plasmid in some embodiments is not packaged in significant amounts due to a lack of ITR sequences. Contamination with adenovirus can be reduced by, e.g., heat treatment to which adenovirus is more sensitive than AAV.

### Non-Viral Delivery of Base Editors

[0508] Nucleic acids encoding multi-effector nucleobase editors can be delivered directly to cells as naked DNA or RNA, for instance by means of transfection or electroporation, or can be conjugated to molecules (e.g., N-acetylgalactosamine) promoting uptake by the target cells. Nucleic acid vectors, such as the vectors can also be used.

[0509] Nucleic acid vectors can comprise one or more sequences encoding a domain of a fusion protein described herein. A vector can also comprise a sequence encoding a signal peptide (e.g., for nuclear localization, nucleolar localization, or mitochondrial localization), associated with (e.g., inserted into or fused to) a sequence coding for a protein. As one example, a nucleic acid vectors can include a Cas9 coding sequence that includes one or more nuclear localization sequences (e.g., a nuclear localization sequence from SV40), and one or more deaminases.

[0510] The nucleic acid vector can also include any suitable number of regulatory/control elements, e.g., promoters, enhancers, introns, polyadenylation signals, Kozak consensus sequences, or internal ribosome entry sites (IRES). These elements are well known in the art.

[0511] Nucleic acid vectors according to this disclosure include recombinant viral vectors. Exemplary viral vectors are set forth herein above. Other viral vectors known in the art can also be used. In addition, viral particles can be used to deliver genome editing system components in nucleic acid and/or peptide form. For example, “empty” viral particles can be assembled to contain any suitable cargo. Viral vectors and viral particles can also be engineered to incorporate targeting ligands to alter target tissue specificity.

[0512] In addition to viral vectors, non-viral delivery approaches for the disclosed base editors are available. One important category of non-viral nucleic acid delivery is that of nanoparticles, which can be organic or inorganic. Nanoparticles are well known in the art. Any suitable nanoparticle design can be used to deliver genome editing system components or nucleic acids encoding such components. For instance, organic (e.g. lipid and/or polymer) nanoparticles can used as delivery vehicles in certain embodiments of this disclosure. Exemplary lipids for use in nanoparticle formulations, and/or gene transfer are shown in Table 7 below.

TABLE 7
Lipids Used for Gene Transfer

| Lipid | Abbreviation | Feature |
|---|---|---|
| 1,2-Dioleoyl-sn-glycero-3-phosphatidylcholine | DOPC | Helper |
| 1,2-Dioleoyl-sn-glycero-3-phosphatidylethanolamine | DOPE | Helper |
| Cholesterol | Helper | |
| N-[1-(2,3-Dioleyloxy)prophyl]N,N,N-trimethylammonium | DOTMA | Cationic |
| chloride | | |
| 1,2-Dioleoyloxy-3-trimethylammonium-propane | DOTAP | Cationic |
| Dioctadecylamidoglycyl spermine | DOGS | Cationic |
| N-(3-Aminopropyl)-N,N-dimethyl-2,3-bis(dodecyloxy)-1- | GAP-DLRIE | Cationic |
| propanaminium bromide | | |
| Cetyltrimethylammonium bromide | CTAB | Cationic |
| 6-Lauroxyhexyl ornithinate | LHON | Cationic |
| 1-(2,3-Dioleoyloxypropyl)-2,4,6-trimethylpyridinium | 2Oc | Cationic |
| 2,3-Dioleyloxy-N-[2(sperminecarboxamido-ethyl]-N,N- | DOSPA | Cationic |
| dimethyl-1-propanaminium trifluoroacetate | | |
| 1,2-Dioleyl-3-trimethylammonium-propane | DOPA | Cationic |
| N-(2-Hydroxyethyl)-N,N-dimethyl-2,3-bis(tetradecyloxy)-1- | MDRIE | Cationic |
| propanaminium bromide | | |
| Dimyristooxypropyl dimethyl hydroxyethyl ammonium bromide | DMRI | Cationic |
| 3β-[N-(N′,N′-Dimethylaminoethane)-carbamoyl]cholesterol | DC-Chol | Cationic |
| Bis-guanidium-tren-cholesterol | BGTC | Cationic |
| 1,3-Diodeoxy-2-(6-carboxy-spermyl)-propylamide | DO SPER | Cationic |
| Dimethyl octadecyl ammonium bromide | DDAB | Cationic |
| Dioctadecylamidoglicylspermidin | DSL | Cationic |
| rac-[(2,3-Dioctadecyloxypropyl)(2-hydroxyethyl)]- | CLIP-1 | Cationic |
| dimethylammonium chloride | | |
| rac-[2(2,3-Dihexadecyloxypropyl- | CLIP-6 | Cationic |
| oxymethyloxy)ethyl]trimethylammonuium bromide | | |
| Ethyldimyristoylphosphatidylcholine | EDMPC | Cationic |
| 1,2-Distearyloxy-N,N-dimethyl-3-aminopropane | DSDMA | Cationic |
| 1,2-Dimyristoyl-trimethylammonium propane | DMTAP | Cationic |
| O,O′-Dimyristyl-N-lysyl aspartate | DMKE | Cationic |
| 1,2-Di stearoyl-sn-glycero-3-ethylphosphocholine | DSEPC | Cationic |
| N-Palmitoyl D-erythro-sphingosyl carbamoyl-spermine | CCS | Cationic |
| N-t-Butyl-N0-tetradecyl-3-tetradecylaminopropionamidine | diC14-amidine | Cationic |
| Octadecenolyoxy[ethyl-2-heptadecenyl-3 hydroxyethyl] | DOTIM | Cationic |
| imidazolinium chloride | | |
| N1-Cholesteryloxycarbonyl-3,7-diazanonane-1,9-diamine | CDAN | Cationic |
| 2-(3-[Bis(3-amino-propyl)-amino]propylamino)-N- | RPR209120 | Cationic |
| ditetradecylcarbamoylme-ethyl-acetamide | | |
| 1,2-dilinol yloxy-3-dimethylaminopropane | DLinDMA | Cationic |
| 2,2-dilinoleyl-4-dimethylaminoethyl-[1,3]-dioxolane | DLin-KC2- | Cationic |
| | DMA | |
| dilinoleyl-methyl-4-dimethylaminobutyrate | DLin-MC3- | Cationic |
| | DMA | |

Table 8 below lists exemplary polymers for use in gene transfer and/or nanoparticle formulations.

TABLE 8
Polymers Used for Gene Transfer

| Polymer | Abbreviation |
|---|---|
| Poly(ethylene)glycol | PEG |
| Polyethylenimine | PEI |
| Dithiobis (succinimidylpropionate) | DSP |
| Dimethyl-3,3′-dithiobispropionimidate | DTBP |
| Poly(ethylene imine)biscarbamate | PEIC |
| Poly(L-lysine) | PLL |
| Histidine modified PLL | |
| Poly(N-vinylpyrrolidone) | PVP |
| Poly(propylenimine) | PPI |
| Poly(amidoamine) | PAMAM |
| Poly(amidoethylenimine) | SS-PAEI |
| Triethylenetetramine | TETA |
| Poly(β-aminoester) | |
| Poly(4-hydroxy-L-proline ester) | PHP |
| Poly(allylamine) | |
| Poly(α-[4-aminobutyl]-L-glycolic acid) | PAGA |
| Poly(D,L-lactic-co-glycolic acid) | PLGA |
| Poly(N-ethyl-4-vinylpyridinium bromide) | |
| Poly(phosphazene)s | PPZ |
| Poly(phosphoester)s | PPE |
| Poly(phosphoramidate)s | PPA |
| Poly(N-2-hydroxypropylmethacrylamide) | pHPMA |
| Poly (2-(dimethylamino)ethyl methacrylate) | pDMAEMA |
| Poly(2-aminoethyl propylene phosphate) | PPE-EA |
| Chitosan | |
| Galactosylated chitosan | |
| N-Dodacylated chitosan | |
| Histone | |
| Collagen | |
| Dextran-spermine | D-SPM |

Table 9 summarizes delivery methods for a polynucleotide encoding a fusion protein described herein.

TABLE 9

| | | Delivery into | | | Type of |
|---|---|---|---|---|---|
| | | Non-Dividing | Duration of | Genome | Molecule |
| Delivery | Vector/Mode | Cells | Expression | Integration | Delivered |
| Physical | (e.g., | YES | Transient | NO | Nucleic Acids |
| | electroporation, | | | | and Proteins |
| | particle gun, | | | | |
| | Calcium | | | | |
| | Phosphate | | | | |
| | transfection | | | | |
| Viral | Retrovirus | NO | Stable | YES | RNA |
| | Lentivirus | YES | Stable | YES/NO with | RNA |
| | | | | modification | |
| | Adenovirus | YES | Transient | NO | DNA |
| | Adeno- | YES | Stable | NO | DNA |
| | Associated | | | | |
| | Virus (AAV) | | | | |
| | Vaccinia Virus | YES | Very | NO | DNA |
| | | | Transient | | |
| | Herpes Simplex | YES | Stable | NO | DNA |
| | Virus | | | | |
| Non-Viral | Cationic | YES | Transient | Depends on | Nucleic Acids |
| | Liposomes | | | what is | and Proteins |
| | | | | delivered | |
| | Polymeric | YES | Transient | Depends on | Nucleic Acids |
| | Nanoparticles | | | what is | and Proteins |
| | | | | delivered | |
| Biological | Attenuated | YES | Transient | NO | Nucleic Acids |
| Non-Viral | Bacteria | | | | |
| Delivery | Engineered | YES | Transient | NO | Nucleic Acids |
| Vehicles | Bacteriophages | | | | |
| | Mammalian | YES | Transient | NO | Nucleic Acids |
| | Virus-like | | | | |
| | Particles | | | | |
| | Biological | YES | Transient | NO | Nucleic Acids |
| | liposomes: | | | | |
| | Erythrocyte | | | | |
| | Ghosts and | | | | |
| | Exosomes | | | | |

[0513] In another aspect, the delivery of base editing system components or nucleic acids encoding such components, for example, a multiplex base editor and/or a nucleic acid binding protein such as, for example, Cas9 or variants thereof, and a gRNA targeting a genomic nucleic acid sequence of interest, may be accomplished by delivering a ribonucleoprotein (RNP) to cells. The RNP comprises the nucleic acid binding protein, e.g., Cas9, in complex with the targeting gRNA. NPs may be delivered to cells using known methods, such as electroporation, nucleofection, or cationic lipid-mediated methods, for example, as reported by Zuris, J. A. et al., 2015, Nat. Biotechnology, 33(1):73-80. RNPs are advantageous for use in CRISPR base editing systems, particularly for cells that are difficult to transfect, such as primary cells. In addition, RNPs can also alleviate difficulties that may occur with protein expression in cells, especially when eukaryotic promoters, e.g., CMV or EF1A, which may be used in CRISPR plasmids, are not well-expressed. Advantageously, the use of RNPs does not require the delivery of foreign DNA into cells. Moreover, because an RNP comprising a nucleic acid binding protein and gRNA complex is degraded over time, the use of RNPs has the potential to limit off-target effects. In a manner similar to that for plasmid based techniques, RNPs can be used to deliver binding protein (e.g., Cas9 variants) and to direct homology directed repair (HDR).

### Screening of Multi-Effector Nucleobase Editors

[0514] The suitability of candidate multi-effector nucleobase editors can be evaluated in various screening approaches. Each fusion protein to be tested is transfected into a cell of interest together with a small amount of a vector encoding a reporter (e.g., GFP). In preliminary experiments, these cells can be immortalized in human cell lines such as 293T, K562 or U20S. Alternatively, primary human cells may be used. In this case, cells may be relevant to the eventual therapeutic cell target.

[0515] Transfection may be performed using lipid transfection (such as Lipofectamine or Fugene) or by electroporation. Following transfection, expression of GFP can be determined either by fluorescence microscopy or by flow cytometry to confirm consistent and high levels of transfection. These preliminary transfections can comprise different nucleobase editors to determine which combinations of editors give the greatest activity.

[0516] The activity of the nucleobase editor is assessed as described herein, i.e., by sequencing the genome of the cells to detect alterations in a target sequence. For Sanger sequencing, purified PCR amplicons are cloned into a plasmid backbone, transformed, miniprepped and sequenced with a single primer. Sequencing may also be performed using next generation sequencing techniques. When using next generation sequencing, amplicons may be 300-500 bp with the intended cut site placed asymmetrically. Following PCR, next generation sequencing adapters and barcodes (for example Illumina multiplex adapters and indexes) may be added to the ends of the amplicon, e.g., for use in high throughput sequencing (for example on an Illumina MiSeq).

[0517] The fusion proteins that induce the greatest levels of target specific alterations in initial tests can be selected for further evaluation.

### Applications for Multi-Effector Nucleobase Editors

[0518] The multi-effector nucleobase editors can be used to target polynucleotides of interest to create alterations that modify protein expression. In one embodiment, a multi-effector nucleobase editor is used to modify a non-coding or regulatory sequence, including but not limited to, splice sites, enhancers, and transcriptional regulatory elements. The effect of the alteration on the expression of a gene controlled by the regulatory element is then assayed using any method known in the art. In a particular embodiment, a multi-effector nucleobase editor is able to substantially alter a regulatory sequence, thereby abolishing its ability to regulate gene expression. Advantageously, this can be done without generating double-stranded breaks in the genomic target sequence, in contrast to other RNA-programmable nucleases.

[0519] The multi-effector nucleobase editors can be used to target polynucleotides of interest to create alterations that modify protein activity. In the context of mutagenesis, for example, multi-effector nucleobase editors have a number of advantages over error-prone PCR and other polymerase-based methods. Because multi-effector nucleobase editors of the invention create alterations at multiple bases in a target region, such mutations are more likely to be expressed at the protein level relative to mutations introduced by error-prone PCR, which are less likely to be expressed at the protein level given that a single nucleotide change in a codon may still encode the same amino acid (e.g., due to codon degeneracy). Unlike error-prone PCR, which induces random alterations throughout a polynucleotide, multi-effector nucleobase editors of the invention can be used to target specific amino acids within a small or defined region of a protein of interest.

[0520] In other embodiments, a multi-effector nucleobase editor of the invention is used to target a polynucleotide of interest within the genome of an organism. In one embodiment, the organism is a bacteria of the microbiome (e.g., Bacteriodetes, Verrucomicrobia, Firmicutes; Gammaproteobacteria, Alphaproteobacteria, Bacteriodetes, Clostridia, Erysipelotrichia, Bacilli; Enterobacteriales, Bacteriodales, Verrucomicrobiales, Clostridiales, Erysiopelotrichales, Lactobacillales; Enterobacteriaceae, Bacteroidaceae, Erysiopelotrichaceae, Prevotellaceae, Coriobacteriaceae, and Alcaligenaceae; Escherichia, Bacteroides, Alistipes, Akkermansia, Clostridium, Lactobacillus). In another embodiment, the organism is an agriculturally important animal (e.g., cow, sheep, goat, horse, chicken, turkey) or plant (e.g., soybeans, wheat, corn, rice, tobacco, apples, grapes, peaches, plums, cherries). In one embodiment, a multi-effector nucleobase editor of the invention is delivered to cells in conjunction with a library of guide RNAs that are used to target a variety of sequences within the genome of a cell, thereby systematically altering sequences throughout the genome. In one embodiment, a multi-effector nucleobase editor of the invention is delivered to cells in conjunction with a library of guide RNAs that are used to target a variety of sequences within the genome of a cell, thereby systematically altering sequences throughout the genome.

[0521] Mutations may be made in any of a variety of proteins to facilitate structure-function analysis or to alter the endogenous activity of the protein. Mutations may be made, for example, in an enzyme (e.g., kinase, phosphatase, carboxylase, phosphodiesterase) or in an enzyme substrate, in a receptor or in its ligand, and in an antibody and its antigen. In one embodiment, a multi-effector nucleobase editor targets a nucleic acid molecule encoding the active site of the enzyme, the ligand binding site of a receptor, or a complementarity determining region (CDR) of an antibody or an antigen binding molecule. In the case of an enzyme, inducing mutations in the active site could increase, decrease, or abolish the enzyme's activity. The effect of mutations on the enzyme is characterized by performing an enzyme activity assay, including any of a number of assays known in the art and/or that would be apparent to the skilled artisan. In the case of a receptor, mutations made at the ligand binding site could increase, decrease or abolish the affinity of a receptor for its ligand. The effect of such mutations is typically assayed in a receptor/ligand binding assay, including any number of assays known in the art and/or that would be apparent to the skilled artisan. In the case of an antibody CDR, mutations made within the CDR could increase, decrease or abolish binding to the cognate antigen. Alternatively, mutations made within the CDR could alter the specificity of the antibody or antigen binding molecule for the antigen. The effect of these alterations on CDR function is then assayed, for example, by measuring the specific binding of the CDR to its antigen or in any other type of immunoassay as would be apparent to the skilled artisan and commonly used in the pertinent art.

### Pharmaceutical Compositions

[0522] Other aspects of the present disclosure relate to pharmaceutical compositions comprising any of the multi-effector base editors, fusion proteins, or the fusion protein-guide polynucleotide complexes described herein. The term “pharmaceutical composition”, as used herein, refers to a composition formulated for pharmaceutical use. In some embodiments, the pharmaceutical composition further comprises a pharmaceutically acceptable carrier. In some embodiments, the pharmaceutical composition comprises additional agents (e.g., for specific delivery, increasing half-life, or other therapeutic compounds).

[0523] As used here, the term “pharmaceutically-acceptable carrier” means a pharmaceutically-acceptable material, composition or vehicle, such as a liquid or solid filler, diluent, excipient, manufacturing aid (e.g., lubricant, talc magnesium, calcium or zinc stearate, or steric acid), or solvent encapsulating material, involved in carrying or transporting the compound from one site (e.g., the delivery site) of the body, to another site (e.g., organ, tissue or portion of the body). A pharmaceutically acceptable carrier is “acceptable” in the sense of being compatible with the other ingredients of the formulation and not injurious to the tissue of the subject (e.g., physiologically compatible, sterile, physiologic pH, etc.).

[0524] Some nonlimiting examples of materials which can serve as pharmaceutically-acceptable carriers include: (1) sugars, such as lactose, glucose and sucrose; (2) starches, such as corn starch and potato starch; (3) cellulose, and its derivatives, such as sodium carboxymethyl cellulose, methylcellulose, ethyl cellulose, microcrystalline cellulose and cellulose acetate; (4) powdered tragacanth; (5) malt; (6) gelatin; (7) lubricating agents, such as magnesium stearate, sodium lauryl sulfate and talc; (8) excipients, such as cocoa butter and suppository waxes; (9) oils, such as peanut oil, cottonseed oil, safflower oil, sesame oil, olive oil, corn oil and soybean oil; (10) glycols, such as propylene glycol; (11) polyols, such as glycerin, sorbitol, mannitol and polyethylene glycol (PEG); (12) esters, such as ethyl oleate and ethyl laurate; (13) agar; (14) buffering agents, such as magnesium hydroxide and aluminum hydroxide; (15) alginic acid; (16) pyrogen-free water; (17) isotonic saline; (18) Ringer's solution; (19) ethyl alcohol; (20) pH buffered solutions; (21) polyesters, polycarbonates and/or polyanhydrides; (22) bulking agents, such as polypeptides and amino acids (23) serum alcohols, such as ethanol; and (23) other non-toxic compatible substances employed in pharmaceutical formulations. Wetting agents, coloring agents, release agents, coating agents, sweetening agents, flavoring agents, perfuming agents, preservative and antioxidants can also be present in the formulation. The terms such as “excipient,” “carrier,” “pharmaceutically acceptable carrier,” “vehicle,” or the like are used interchangeably herein.

[0525] Pharmaceutical compositions can comprise one or more pH buffering compounds to maintain the pH of the formulation at a predetermined level that reflects physiological pH, such as in the range of about 5.0 to about 8.0. The pH buffering compound used in the aqueous liquid formulation can be an amino acid or mixture of amino acids, such as histidine or a mixture of amino acids such as histidine and glycine. Alternatively, the pH buffering compound is an agent which maintains the pH of the formulation at a predetermined level, such as in the range of about 5.0 to about 8.0, and which does not chelate calcium ions. Illustrative examples of such pH buffering compounds include, but are not limited to, imidazole and acetate ions. The pH buffering compound may be present in any amount suitable to maintain the pH of the formulation at a predetermined level.

[0526] Pharmaceutical compositions can also contain one or more osmotic modulating agents, i.e., a compound that modulates the osmotic properties (e.g., tonicity, osmolality, and/or osmotic pressure) of the formulation to a level that is acceptable to the blood stream and blood cells of recipient individuals. The osmotic modulating agent can be an agent that does not chelate calcium ions. The osmotic modulating agent can be any compound known or available to those skilled in the art that modulates the osmotic properties of the formulation. One skilled in the art may empirically determine the suitability of a given osmotic modulating agent for use in the inventive formulation. Illustrative examples of suitable types of osmotic modulating agents include, but are not limited to: salts, such as sodium chloride and sodium acetate; sugars, such as sucrose, dextrose, and mannitol; amino acids, such as glycine; and mixtures of one or more of these agents and/or types of agents. The osmotic modulating agent(s) may be present in any concentration sufficient to modulate the osmotic properties of the formulation.

[0527] In some embodiments, the pharmaceutical composition is formulated for delivery to a subject, e.g., for gene editing. Suitable routes of administrating the pharmaceutical composition described herein include, without limitation: topical, subcutaneous, transdermal, intradermal, intralesional, intraarticular, intraperitoneal, intravesical, transmucosal, gingival, intradental, intracochlear, transtympanic, intraorgan, epidural, intrathecal, intramuscular, intravenous, intravascular, intraosseus, periocular, intratumoral, intracerebral, and intracerebroventricular administration.

[0528] In some embodiments, the pharmaceutical composition described herein is administered locally to a diseased site (e.g., CNS, motor neuron). In some embodiments, the pharmaceutical composition described herein is administered to a subject by injection, by means of a catheter, by means of a suppository, or by means of an implant, the implant being of a porous, non-porous, or gelatinous material, including a membrane, such as a sialastic membrane, or a fiber.

[0529] In other embodiments, the pharmaceutical composition described herein is delivered in a controlled release system. In one embodiment, a pump can be used (See, e.g., Langer, 1990, Science 249: 1527-1533; Sefton, 1989, CRC Crit. Ref. Biomed. Eng. 14:201; Buchwald et al., 1980, Surgery 88:507; Saudek et al., 1989, N. Engl. J. Med. 321:574). In another embodiment, polymeric materials can be used. (See, e.g., Medical Applications of Controlled Release (Langer and Wise eds., CRC Press, Boca Raton, Fla., 1974); Controlled Drug Bioavailability, Drug Product Design and Performance (Smolen and Ball eds., Wiley, New York, 1984); Ranger and Peppas, 1983, Macromol. Sci. Rev. Macromol. Chem. 23:61. See also Levy et al., 1985, Science 228: 190; During et al., 1989, Ann. Neurol. 25:351; Howard et ah, 1989, J. Neurosurg. 71: 105.) Other controlled release systems are discussed, for example, in Langer, supra.

[0530] In some embodiments, the pharmaceutical composition is formulated in accordance with routine procedures as a composition adapted for intravenous or subcutaneous administration to a subject, e.g., a human. In some embodiments, pharmaceutical composition for administration by injection are solutions in sterile isotonic use as solubilizing agent and a local anesthetic such as lignocaine to ease pain at the site of the injection. Generally, the ingredients are supplied either separately or mixed together in unit dosage form, for example, as a dry lyophilized powder or water free concentrate in a hermetically sealed container such as an ampoule or sachette indicating the quantity of active agent.

[0531] Where the pharmaceutical is to be administered by infusion, it can be dispensed with an infusion bottle containing sterile pharmaceutical grade water or saline. Where the pharmaceutical composition is administered by injection, an ampoule of sterile water for injection or saline can be provided so that the ingredients can be mixed prior to administration.

[0532] A pharmaceutical composition for systemic administration can be a liquid, e.g., sterile saline, lactated Ringer's or Hank's solution. In addition, the pharmaceutical composition can be in solid forms and re-dissolved or suspended immediately prior to use. Lyophilized forms are also contemplated. The pharmaceutical composition can be contained within a lipid particle or vesicle, such as a liposome or microcrystal, which is also suitable for parenteral administration. The particles can be of any suitable structure, such as unilamellar or plurilamellar, so long as compositions are contained therein. Compounds can be entrapped in “stabilized plasmid-lipid particles” (SPLP) containing the fusogenic lipid dioleoylphosphatidylethanolamine (DOPE), low levels (5-10 mol %) of cationic lipid, and stabilized by a polyethyleneglycol (PEG) coating (Zhang Y. P. et ah, Gene Ther. 1999, 6: 1438-47). Positively charged lipids such as N-[1-(2,3-dioleoyloxi)propyl]-N,N,N-trimethyl-amoniummethylsulfate, or “DOTAP,” are particularly preferred for such particles and vesicles. The preparation of such lipid particles is well known. See, e.g., U.S. Pat. Nos. 4,880,635; 4,906,477; 4,911,928; 4,917,951; 4,920,016; and 4,921,757; each of which is incorporated herein by reference.

[0533] The pharmaceutical composition described herein can be administered or packaged as a unit dose, for example. The term “unit dose” when used in reference to a pharmaceutical composition of the present disclosure refers to physically discrete units suitable as unitary dosage for the subject, each unit containing a predetermined quantity of active material calculated to produce the desired therapeutic effect in association with the required diluent; i.e., carrier, or vehicle.

[0534] Further, the pharmaceutical composition can be provided as a pharmaceutical kit comprising (a) a container containing a compound of the invention in lyophilized form and (b) a second container containing a pharmaceutically acceptable diluent (e.g., sterile used for reconstitution or dilution of the lyophilized compound of the invention. Optionally associated with such container(s) can be a notice in the form prescribed by a governmental agency regulating the manufacture, use or sale of pharmaceuticals or biological products, which notice reflects approval by the agency of manufacture, use or sale for human administration.

[0535] In another aspect, an article of manufacture containing materials useful for the treatment of the diseases described above is included. In some embodiments, the article of manufacture comprises a container and a label. Suitable containers include, for example, bottles, vials, syringes, and test tubes. The containers can be formed from a variety of materials such as glass or plastic. In some embodiments, the container holds a composition that is effective for treating a disease described herein and can have a sterile access port. For example, the container can be an intravenous solution bag or a vial having a stopper pierceable by a hypodermic injection needle. The active agent in the composition is a compound of the invention. In some embodiments, the label on or associated with the container indicates that the composition is used for treating the disease of choice. The article of manufacture can further comprise a second container comprising a pharmaceutically-acceptable buffer, such as phosphate-buffered saline, Ringer's solution, or dextrose solution. It can further include other materials desirable from a commercial and user standpoint, including other buffers, diluents, filters, needles, syringes, and package inserts with instructions for use.

[0536] In some embodiments, any of the fusion proteins, gRNAs, and/or complexes described herein are provided as part of a pharmaceutical composition. In some embodiments, the pharmaceutical composition comprises any of the fusion proteins provided herein. In some embodiments, the pharmaceutical composition comprises any of the complexes provided herein. In some embodiments, the pharmaceutical composition comprises a ribonucleoprotein complex comprising an RNA-guided nuclease (e.g., Cas9) that forms a complex with a gRNA and a cationic lipid. In some embodiments pharmaceutical composition comprises a gRNA, a nucleic acid programmable DNA binding protein, a cationic lipid, and a pharmaceutically acceptable excipient. Pharmaceutical compositions can optionally comprise one or more additional therapeutically active substances.

[0537] Modification of pharmaceutical compositions suitable for administration to humans in order to render the compositions suitable for administration to various animals is well understood, and the ordinarily skilled veterinary pharmacologist can design and/or perform such modification with merely ordinary, if any, experimentation. Subjects to which administration of the pharmaceutical compositions is contemplated include, but are not limited to, humans and/or other primates; mammals, domesticated animals, pets, and commercially relevant mammals such as cattle, pigs, horses, sheep, cats, dogs, mice, and/or rats; and/or birds, including commercially relevant birds such as chickens, ducks, geese, and/or turkeys.

[0538] Formulations of the pharmaceutical compositions described herein can be prepared by any method known or hereafter developed in the art of pharmacology. In general, such preparatory methods include the step of bringing the active ingredient(s) into association with an excipient and/or one or more other accessory ingredients, and then, if necessary and/or desirable, shaping and/or packaging the product into a desired single- or multi-dose unit. Pharmaceutical formulations can additionally comprise a pharmaceutically acceptable excipient, which, as used herein, includes any and all solvents, dispersion media, diluents, or other liquid vehicles, dispersion or suspension aids, surface active agents, isotonic agents, thickening or emulsifying agents, preservatives, solid binders, lubricants and the like, as suited to the particular dosage form desired. Remington's The Science and Practice of Pharmacy, 21st Edition, A. R. Gennaro (Lippincott, Williams & Wilkins, Baltimore, Md., 2006; incorporated in its entirety herein by reference) discloses various excipients used in formulating pharmaceutical compositions and known techniques for the preparation thereof. See also PCT application PCT/US2010/055131 (Publication number WO2011053982 A8, filed Nov. 2, 2010), incorporated in its entirety herein by reference, for additional suitable methods, reagents, excipients and solvents for producing pharmaceutical compositions comprising a nuclease.

[0539] Except insofar as any conventional excipient medium is incompatible with a substance or its derivatives, such as by producing any undesirable biological effect or otherwise interacting in a deleterious manner with any other component(s) of the pharmaceutical composition, its use is contemplated to be within the scope of this disclosure.

[0540] The compositions, as described above, can be administered in effective amounts. The effective amount will depend upon the mode of administration, the particular condition being treated, and the desired outcome. It may also depend upon the stage of the condition, the age and physical condition of the subject, the nature of concurrent therapy, if any, and like factors well-known to the medical practitioner. For therapeutic applications, it is that amount sufficient to achieve a medically desirable result.

### Methods of Treating a Disease or Disorder

[0541] Provided also are methods of treating a disease or disorder, which methods comprise administering to a subject (e.g., a mammal, such as a human) a therapeutically effective amount of a pharmaceutical composition that comprises a polynucleotide encoding a base editor system (e.g., multi-effector base editor and gRNA) as described herein. In some embodiments, the base editor is a fusion protein that comprises a polynucleotide programmable DNA binding domain, one or more deaminase domains (e.g., an adenosine deaminase domain and a cytidine deaminase domain). A cell of the subject is transduced with the multi-effector base editor and one or more guide polynucleotides that target the base editor to effect an A•T to G•C alteration and a C•G to U•A alteration (if the cell is transduced with an adenosine deaminase domain and a cytidine deaminase domain) of a target nucleic acid sequence.

[0542] The methods herein include administering to the subject (including a subject identified as being in need of such treatment, or a subject suspected of being at risk of disease and in need of such treatment) an effective amount of a composition described herein. Identifying a subject in need of such treatment can be in the judgment of a subject or a health care professional and can be subjective (e.g., opinion) or objective (e.g., measurable by a test or diagnostic method).

[0543] The therapeutic methods, in general, comprise administration of a therapeutically effective amount of a pharmaceutical composition comprising, for example, a vector encoding a multi-effector base editor and a gRNA that targets a polynucleotide sequence, e.g., a polynucleotide sequence (gene) that is associated with a disease or disorder, of a subject (e.g., a human patient) in need thereof. Such treatment will be suitably administered to a subject, particularly a human subject, suffering from, having, susceptible to, or at risk for the disease or disorder.

[0544] In an embodiment, a method of monitoring treatment progress is provided. The method includes the step of determining a level of diagnostic marker (Marker) or diagnostic measurement (e.g., screen, assay) in a subject suffering from or susceptible to a disease or disorder or symptoms thereof, in which the subject has been administered a therapeutic amount of a composition herein sufficient to treat the disease or symptoms thereof. The level of Marker determined in the method can be compared to known levels of Marker in either healthy normal controls or in other afflicted patients to establish the subject's disease status. In preferred embodiments, a second level of Marker in the subject is determined at a time point later than the determination of the first level, and the two levels are compared to monitor the course of disease or the efficacy of the therapy. In certain preferred embodiments, a pre-treatment level of Marker in the subject is determined prior to beginning treatment according to this invention; this pre-treatment level of Marker can then be compared to the level of Marker in the subject after the treatment commences, to determine the efficacy of the treatment.

[0545] In some embodiments, compositions including the multi-effector base editors as provided herein are administered to a subject, for example, to a human subject, in order to effect a targeted genomic modification within the subject. In some embodiments, cells are obtained from the subject and contacted with any of the pharmaceutical compositions provided herein. In some embodiments, cells removed from a subject and contacted ex vivo with a pharmaceutical composition are re-introduced into the subject, optionally, after the desired genomic modification has been effected or detected in the cells. Methods of delivering pharmaceutical compositions comprising nucleases are known, and are described, for example, in U.S. Pat. Nos. 6,453,242; 6,503,717; 6,534,261; 6,599,692; 6,607,882; 6,689,558; 6,824,978; 6,933,113; 6,979,539; 7,013,219; and 7,163,824, the disclosures of all of which are incorporated by reference herein in their entireties. Although the descriptions of pharmaceutical compositions provided herein are principally directed to pharmaceutical compositions which are suitable for administration to humans, it will be understood by the skilled artisan that such compositions are generally suitable for administration to animals or organisms of all sorts, for example, for veterinary use.

### Kits

[0546] Various aspects of this disclosure provide kits comprising a base editor system. In one embodiment, the kit comprises a nucleic acid construct comprising a nucleotide sequence encoding a multi-effector nucleobase editor capable of deaminating a nucleobase in a deoxyribonucleic acid (DNA) molecule. In certain embodiments, the multi-effector nucleobase editor has cytidine deaminase and/or adenosine deaminase activity. In some embodiments, the nucleotide sequence comprises a heterologous promoter that drives expression of the multi-effector nucleobase editor.

[0547] In an aspect, a kit comprising a nucleic acid construct, comprising (a) a nucleotide sequence encoding (a) a Cas9 domain fused to an adenosine deaminase and a cytidine deaminase as provided herein; and (b) a heterologous promoter that drives expression of the sequence of (a) is provided.

[0548] In another aspect, cells comprising any of the multi-effector nucleobase editor/fusion proteins provided herein are provided. In some embodiments, the cells comprise any of the nucleotides or vectors provided herein.

[0549] In some embodiments, the kit provides instructions for using the kit to effect multi-effector base editing using the systems as disclosed herein. The instructions will generally include information about the use of the kit for editing nucleic acid molecules. In other embodiments, the instructions include at least one of the following: precautions; warnings; clinical studies; and/or references. The instructions may be printed directly on the container (when present), or as a label applied to the container, or as a separate sheet, pamphlet, card, or folder supplied in or with the container. In a further embodiment, a kit can comprise instructions in the form of a label or separate insert (package insert) for suitable operational parameters. In yet another embodiment, the kit can comprise one or more containers with appropriate positive and negative controls or control samples, to be used as standard(s) for detection, calibration, or normalization. The kit can further comprise a second container comprising a pharmaceutically-acceptable buffer, such as (sterile) phosphate-buffered saline, Ringer's solution, or dextrose solution. It can further include other materials desirable from a commercial and user standpoint, including other buffers, diluents, filters, needles, syringes, and package inserts with instructions for use.

[0550] The practice of the present invention employs, unless otherwise indicated, conventional techniques of molecular biology (including recombinant techniques), microbiology, cell biology, biochemistry and immunology, which are well within the purview of the skilled artisan. Such techniques are explained fully in the literature, such as, “Molecular Cloning: A Laboratory Manual”, second edition (Sambrook, 1989); “Oligonucleotide Synthesis” (Gait, 1984); “Animal Cell Culture” (Freshney, 1987); “Methods in Enzymology” “Handbook of Experimental Immunology” (Weir, 1996); “Gene Transfer Vectors for Mammalian Cells” (Miller and Calos, 1987); “Current Protocols in Molecular Biology” (Ausubel, 1987); “PCR: The Polymerase Chain Reaction”, (Mullis, 1994); “Current Protocols in Immunology” (Coligan, 1991). These techniques are applicable to the production of the polynucleotides and polypeptides of the invention, and, as such, may be considered in making and practicing the invention. Particularly useful techniques for particular embodiments will be discussed in the sections that follow.

### EXAMPLES

[0551] The following examples are put forth so as to provide those of ordinary skill in the art with a complete disclosure and description of how to make and use the assay, screening, and therapeutic methods of the invention, and are not intended to limit the scope of what the inventors regard as their invention.

### Example 1: Multi-Effector Nucleobase Editors

[0552] A multi-effector nucleobase editor was developed comprising a Cas9 nucleic acid programmable DNA binding domain, a heterodimer of wild-type TadA and TadA7.10, a Pteromyzon marinus cytidine deaminase, and two Uracil DNA glycosylase inhibitor domains, in a plasmid construct termed pNMG-B79. The TadA7.10 domain has adenosine deaminase activity. The S. pyogenes nCas9 (D10A) domain has nickase activity. The Pteromyzon marinus cytidine deaminase (pmCDA) has cytidine deaminase activity. It also includes two Uracil DNA glycosylase inhibitor domains (UGI). UGI is an 83-residue protein from Bacillus subtilis bacteriophage PBS1, which potently blocks human UDG activity (IC₅₀=12 pM). The pNMG-B79 polypeptide includes nuclear localization signals at its N- and C-termini.

[0553] The sequence of pNMG-B79 follows:

pNMG-B79: -NLS in bold-wtTadA underlined-32 a.a. linker italics-TadA*7.10 underlined-23. a.a. linker italics-nCas9-32 a.a. linker italics-pmCDA-UGI-UGI bold and underlined-NLS-BP-NLS bold italics

MPKKKRKVSEVEFSHEYWMRHALTLAKRAWDEREVPVGAVLVHNNRVIGEGWNRPIGRHDPT
AHAEIMALRQGGLVMQNYRLIDATLYVTLEPCVMCAGAMIHSRIGRVVFGARDAKTGAAGSL
MDVLHHPGMNHRVEITEGILADECAALLSDFFRMRRQEIKAQKKAQSSTDSGGSSGGSSGSE
TPGTSESATPESSGGSSGGSSEVEFSHEYWMRHALTLAKRARDEREVPVGAVLVLNNRVIGE
GWNRAIGLHDPTAHAEIMALRQGGLVMQNYRLIDATLYVTFEPCVMCAGAMIHSRIGRVVFG
VRNAKTGAAGSLMDVLHYPGMNHRVEITEGILADECAALLCYFFRMPRQVFNAQKKAQSSTD
SGGSSGGSSGSETPGTSESATPEDKKYSIGLAIGTNSVGWAVITDEYKVPSKKFKVLGNTDR
HSIKKNLIGALLFDSGETAEATRLKRTARRRYTRRKNRICYLQEIFSNEMAKVDDSFFHRLE
ESFLVEEDKKHERHPIFGNIVDEVAYHEKYPTIYHLRKKLVDSTDKADLRLIYLALAHMIKF
RGHFLIEGDLNPDNSDVDKLFIQLVQTYNQLFEENPINASGVDAKAILSARLSKSRRLENLI
AQLPGEKKNGLFGNLIALSLGLTPNFKSNFDLAEDAKLQLSKDTYDDDLDNLLAQIGDQYAD
LFLAAKNLSDAILLSDILRVNTEITKAPLSASMIKRYDEHHQDLTLLKALVRQQLPEKYKEI
FFDQSKNGYAGYIDGGASQEEFYKFIKPILEKMDGTEELLVKLNREDLLRKQRTFDNGSIPH
QIHLGELHAILRRQEDFYPFLKDNREKIEKILTFRIPYYVGPLARGNSRFAWMTRKSEETIT
PWNFEEVVDKGASAQSFIERMTNFDKNLPNEKVLPKHSLLYEYFTVYNELTKVKYVTEGMRK
PAFLSGEQKKAIVDLLFKTNRKVTVKQLKEDYFKKIECFDSVEISGVEDRFNASLGTYHDLL
KIIKDKDFLDNEENEDILEDIVLTLTLFEDREMIEERLKTYAHLFDDKVMKQLKRRRYTGWG
RLSRKLINGIRDKQSGKTILDFLKSDGFANRNFMQLIHDDSLTFKEDIQKAQVSGQGDSLHE
HIANLAGSPAIKKGILQTVKVVDELVKVMGRHKPENIVIEMARENQTTQKGQKNSRERMKRI
EEGIKELGSQILKEHPVENTQLQNEKLYLYYLQNGRDMYVDQELDINRLSDYDVDHIVPQSF
LKDDSIDNKVLTRSDKNRGKSDNVPSEEVVKKMKNYWRQLLNAKLITQRKFDNLTKAERGGL
SELDKAGFIKRQLVETRQITKHVAQILDSRMNTKYDENDKLIREVKVITLKSKLVSDFRKDF
QFYKVREINNYHHAHDAYLNAVVGTALIKKYPKLESEFVYGDYKVYDVRKMIAKSEQEIGKA
TAKYFFYSNIMNFFKTEITLANGEIRKRPLIETNGETGEIVWDKGRDFATVRKVLSMPQVNI
VKKTEVQTGGFSKESILPKRNSDKLIARKKDWDPKKYGGFDSPTVAYSVLVVAKVEKGKSKK
LKSVKELLGITIMERSSFEKNPIDFLEAKGYKEVKKDLIIKLPKYSLFELENGRKRMLASAG
ELQKGNELALPSKYVNFLYLASHYEKLKGSPEDNEQKQLFVEQHKHYLDEIIEQISEFSKRV
ILADANLDKVLSAYNKHRDKPIREQAENIIHLFTLTNLGAPAAFKYFDTTIDRKRYTSTKEV
LDATLIHQSITGLYETRIDLSQLGGDSGGSSGGSSGSETPGTSESATPESSGGSSGGSTDAE
YVRIHEKLDIYTFKKQFFNNKKSVSHRCYVLFELKRRGERRACFWGYAVNKPQSGTERGIHA
EIFSIRKVEEYLRDNPGQFTINWYSSWSPCADCAEKILEWYNQELRGNGHTLKIWACKLYYE
KNARNQIGLWNLRDNGVGLNVMVSEHYQCCRKIFIQSSHNQLNENRWLEKTLKRAEKRRSEL
SIMIQVKILHTTKSPAVSGGSGGSGGSTNLSDIIEKETGKQLVIQESILMLPEEVEEVIGNK
PESDILVHTAYDESTDENVMLLTSDAPEYKPWALVIQDSNGENKIKMLSGGSGGSGGSTNLS
DIIEKETGKQLVIQESILMLPEEVEEVIGNKPESDILVHTAYDESTDENVMLLTSDAPEYKP
WALVIQDSNGENKIKML

[symbol]

[symbol]

[0554] pNMG-B92: -NLS bold -wtTadA underlined-32 a.a. linker italics-TadA*7.10 underlined-23. a.a. linker italics-nCas9-105 a.a. linker italics-pmCDA underlined-linker italics-UGI-UGI bold underlined -NLS-BP-NLS bold italics

MPKKKRKVSEVEFSHEYWMRHALTLAKRAWDEREVPVGAVLVHNNRVIGEGWNRPIGRHDPT
AHAEIMALRQGGLVMQNYRLIDATLYVTLEPCVMCAGAMIHSRIGRVVFGARDAKTGAAGSL
MDVLHHPGMNHRVEITEGILADECAALLSDFFRMRRQEIKAQKKAQSSTDSGGSSGGSSGSE
TPGTSESATPESSGGSSGGSSEVEFSHEYWMRHALTLAKRARDEREVPVGAVLVLNNRVIGE
GWNRAIGLHDPTAHAEIMALRQGGLVMQNYRLIDATLYVTFEPCVMCAGAMIHSRIGRVVFG
VRNAKTGAAGSLMDVLHYPGMNHRVEITEGILADECAALLCYFFRMPRQVFNAQKKAQSSTD
SGGSSGGSSGSETPGTSESATPEDKKYSIGLAIGTNSVGWAVITDEYKVPSKKFKVLGNTDR
HSIKKNLIGALLFDSGETAEATRLKRTARRRYTRRKNRICYLQEIFSNEMAKVDDSFFHRLE
ESFLVEEDKKHERHPIFGNIVDEVAYHEKYPTIYHLRKKLVDSTDKADLRLIYLALAHMIKF
RGHFLIEGDLNPDNSDVDKLFIQLVQTYNQLFEENPINASGVDAKAILSARLSKSRRLENLI
AQLPGEKKNGLFGNLIALSLGLTPNFKSNFDLAEDAKLQLSKDTYDDDLDNLLAQIGDQYAD
LFLAAKNLSDAILLSDILRVNTEITKAPLSASMIKRYDEHHQDLTLLKALVRQQLPEKYKEI
FFDQSKNGYAGYIDGGASQEEFYKFIKPILEKMDGTEELLVKLNREDLLRKQRTFDNGSIPH
QIHLGELHAILRRQEDFYPFLKDNREKIEKILTFRIPYYVGPLARGNSRFAWMTRKSEETIT
PWNFEEVVDKGASAQSFIERMTNFDKNLPNEKVLPKHSLLYEYFTVYNELTKVKYVTEGMRK
PAFLSGEQKKAIVDLLFKTNRKVTVKQLKEDYFKKIECFDSVEISGVEDRFNASLGTYHDLL
KIIKDKDFLDNEENEDILEDIVLTLTLFEDREMIEERLKTYAHLFDDKVMKQLKRRRYTGWG
RLSRKLINGIRDKQSGKTILDFLKSDGFANRNFMQLIHDDSLTFKEDIQKAQVSGQGDSLHE
HIANLAGSPAIKKGILQTVKVVDELVKVMGRHKPENIVIEMARENQTTQKGQKNSRERMKRI
EEGIKELGSQILKEHPVENTQLQNEKLYLYYLQNGRDMYVDQELDINRLSDYDVDHIVPQSF
LKDDSIDNKVLTRSDKNRGKSDNVPSEEVVKKMKNYWRQLLNAKLITQRKFDNLTKAERGGL
SELDKAGFIKRQLVETRQITKHVAQILDSRMNTKYDENDKLIREVKVITLKSKLVSDFRKDF
QFYKVREINNYHHAHDAYLNAVVGTALIKKYPKLESEFVYGDYKVYDVRKMIAKSEQEIGKA
TAKYFFYSNIMNFFKTEITLANGEIRKRPLIETNGETGEIVWDKGRDFATVRKVLSMPQVNI
VKKTEVQTGGFSKESILPKRNSDKLIARKKDWDPKKYGGFDSPTVAYSVLVVAKVEKGKSKK
LKSVKELLGITIMERSSFEKNPIDFLEAKGYKEVKKDLIIKLPKYSLFELENGRKRMLASAG
ELQKGNELALPSKYVNFLYLASHYEKLKGSPEDNEQKQLFVEQHKHYLDEIIEQISEFSKRV
ILADANLDKVLSAYNKHRDKPIREQAENIIHLFTLTNLGAPAAFKYFDTTIDRKRYTSTKEV
LDATLIHQSITGLYETRIDLSQLGGDSRADPKKKRKVGGGGTGGGGSAEYVRALFDFNGNDE
EDLPFKKGDILRIRDKPEEQWWNAEDSEGKRGMILVPYVEKYSGDYKDHDGDYKDHDIDYKD
DDDKSGMTDAEYVRIHEKLDIYTFKKQFFNNKKSVSHRCYVLFELKRRGERRACFWGYAVNK
PQSGTERGIHAEIFSIRKVEEYLRDNPGQFTINWYSSWSPCADCAEKILEWYNQELRGNGHT
LKIWACKLYYEKNARNQIGLWNLRDNGVGLNVMVSEHYQCCRKIFIQSSHNQLNENRWLEKT
LKRAEKWRSELSIMIQVKILHTTKSPAVGPKKKRKVGTSGGSGGSGGSTNLSDIIEKETGKQ
LVIQESILMLPEEVEEVIGNKPESDILVHTAYDESTDENVMLLTSDAPEYKPWALVIQDSNG
ENKIKMLSGGSGGSGGSTNLSDIIEKETGKQLVIQESILMLPEEVEEVIGNKPESDILVHTA
YDESTDENVMLLTSDAPEYKPWALVIQDSNGENKIKML

[symbol]

[symbol]

[0555] pNMG-B93: -NLS-wtTadA-32 a.a. linker italics-TadA*7.10 underlined-23. a.a. linker italics-nCas9-105 a.a. linker italics-rAPOBEC1 underlined-linker italics-UGI-UGI bold underlined-NLS-BP-NLS bold italics

MPKKKRKVSEVEFSHEYWMRHALTLAKRAWDEREVPVGAVLVHNNRVIGEGWNRPIGRHDPT
AHAEIMALRQGGLVMQNYRLIDATLYVTLEPCVMCAGAMIHSRIGRVVFGARDAKTGAAGSL
MDVLHHPGMNHRVEITEGILADECAALLSDFFRMRRQEIKAQKKAQSSTDSGGSSGGSSGSE
TPGTSESATPESSGGSSGGSSEVEFSHEYWMRHALTLAKRARDEREVPVGAVLVLNNRVIGE
GWNRAIGLHDPTAHAEIMALRQGGLVMQNYRLIDATLYVTFEPCVMCAGAMIHSRIGRVVFG
VRNAKTGAAGSLMDVLHYPGMNHRVEITEGILADECAALLCYFFRMPRQVFNAQKKAQSSTD
SGGSSGGSSGSETPGTSESATPEDKKYSIGLAIGTNSVGWAVITDEYKVPSKKFKVLGNTDR
HSIKKNLIGALLFDSGETAEATRLKRTARRRYTRRKNRICYLQEIFSNEMAKVDDSFFHRLE
ESFLVEEDKKHERHPIFGNIVDEVAYHEKYPTIYHLRKKLVDSTDKADLRLIYLALAHMIKF
RGHFLIEGDLNPDNSDVDKLFIQLVQTYNQLFEENPINASGVDAKAILSARLSKSRRLENLI
AQLPGEKKNGLFGNLIALSLGLTPNFKSNFDLAEDAKLQLSKDTYDDDLDNLLAQIGDQYAD
LFLAAKNLSDAILLSDILRVNTEITKAPLSASMIKRYDEHHQDLTLLKALVRQQLPEKYKEI
FFDQSKNGYAGYIDGGASQEEFYKFIKPILEKMDGTEELLVKLNREDLLRKQRTFDNGSIPH
QIHLGELHAILRRQEDFYPFLKDNREKIEKILTFRIPYYVGPLARGNSRFAWMTRKSEETIT
PWNFEEVVDKGASAQSFIERMTNFDKNLPNEKVLPKHSLLYEYFTVYNELTKVKYVTEGMRK
PAFLSGEQKKAIVDLLFKTNRKVTVKQLKEDYFKKIECFDSVEISGVEDRFNASLGTYHDLL
KIIKDKDFLDNEENEDILEDIVLTLTLFEDREMIEERLKTYAHLFDDKVMKQLKRRRYTGWG
RLSRKLINGIRDKQSGKTILDFLKSDGFANRNFMQLIHDDSLTFKEDIQKAQVSGQGDSLHE
HIANLAGSPAIKKGILQTVKVVDELVKVMGRHKPENIVIEMARENQTTQKGQKNSRERMKRI
EEGIKELGSQILKEHPVENTQLQNEKLYLYYLQNGRDMYVDQELDINRLSDYDVDHIVPQSF
LKDDSIDNKVLTRSDKNRGKSDNVPSEEVVKKMKNYWRQLLNAKLITQRKFDNLTKAERGGL
SELDKAGFIKRQLVETRQITKHVAQILDSRMNTKYDENDKLIREVKVITLKSKLVSDFRKDF
QFYKVREINNYHHAHDAYLNAVVGTALIKKYPKLESEFVYGDYKVYDVRKMIAKSEQEIGKA
TAKYFFYSNIMNFFKTEITLANGEIRKRPLIETNGETGEIVWDKGRDFATVRKVLSMPQVNI
VKKTEVQTGGFSKESILPKRNSDKLIARKKDWDPKKYGGFDSPTVAYSVLVVAKVEKGKSKK
LKSVKELLGITIMERSSFEKNPIDFLEAKGYKEVKKDLIIKLPKYSLFELENGRKRMLASAG
ELQKGNELALPSKYVNFLYLASHYEKLKGSPEDNEQKQLFVEQHKHYLDEIIEQISEFSKRV
ILADANLDKVLSAYNKHRDKPIREQAENIIHLFTLTNLGAPAAFKYFDTTIDRKRYTSTKEV
LDATLIHQSITGLYETRIDLSQLGGDSRADPKKKRKVGGGGTGGGGSAEYVRALFDFNGNDE
EDLPFKKGDILRIRDKPEEQWWNAEDSEGKRGMILVPYVEKYSGDYKDHDGDYKDHDIDYKD
DDDKSGSSETGPVAVDPTLRRRIEPHEFEVFFDPRELRKETCLLYEINWGGRHSIWRHTSQN
TNKHVEVNFIEKFTTERYFCPNTRCSITWFLSWSPCGECSRAITEFLSRYPHVTLFIYIARL
YHHADPRNRQGLRDLISSGVTIQIMTEQESGYCWRNFVNYSPSNEAHWPRYPHLWVRLYVLE
LYCIILGLPPCLNILRRKQPQLTFFTIALQSCHYQRLPPHILWATGLKGPKKKRKVGTSGGS
GGSGGSTNLSDIIEKETGKQLVIQESILMLPEEVEEVIGNKPESDILVHTAYDESTDENVML
LTSDAPEYKPWALVIQDSNGENKIKMLSGGSGGSGGSTNLSDIIEKETGKQLVIQESILMLP
EEVEEVIGNKPESDILVHTAYDESTDENVMLLTSDAPEYKPWALVIQDSNGENKIKML

[symbol]

[symbol]

[0556] HEK293T cells were co-transfected with pNMG-B79 or a plasmid encoding ABE7.10, and the appropriate sgRNA. The vector included a CMV promoter to drive expression of the fusion protein. The cells were allowed to remain in culture for five days to allow nucleobase editing to occur. Thereafter, genomic DNA was extracted from the cells, and the loci were analyzed by high throughput sequencing (HTS). The sgRNA targeted 20-base pairs 5′ of a PAM sequence as shown in FIG. 1. Adenine Base Editor (ABE)7.10, which is an adenosine deaminase, converted the adenosine at position 5 (A5) to G in approximately 80% of the polynucleotides sequenced (FIG. 1) and converted A7 to Gin 29% of the polynucleotides sequenced (FIG. 1). An untreated polynucleotide incubated under similar conditions but in the absence of any base editor was included as a control and had no such modifications (FIG. 1, bottom).

[0557] Surprisingly, pNMG-B79 showed both adenosine deaminase activity and cytosine deaminase activity (FIG. 1, middle). pNMG-B79 converted C4 to T in 41% of the polynucleotides sequenced, converted A5 to Gin 66% of the polynucleotides sequenced, converted C6 to T in approximately 35% of the polynucleotides sequenced; and converted A to G in approximately 15% of the polynucleotides sequenced. This marks the first demonstration of a base editor that can create all transition mutations on a target polynucleotide.

[0558] The base editing activity of pNMG-B79 variants was tested. In base editors pNMG-90 and 92, the length of the linker between the nCas9 (D10A) domain and the cytidine deaminase domain was increased from 32 in pNMG-B79 to 104 amino acids. In another example, base editor pNMG-91 and 93, the pmCDA was swapped for rAPOBEC1 and a long linker was included between nCas9 (D10A) and rAPOBEC1 (FIG. 2). FIG. 3A provides schematics of multi-effector nucleobase editors. The ability of the base editor to modify genomic DNA was assayed (FIG. 3B). pNMG-B79 converted A5 to G in 58% of the polynucleotides sequenced, and converted C6 to T in approximately 25% of the polynucleotides sequenced. pNMG-90 and 92 showed different degrees of activity. pNMG-92 converted A5 to Gin 50% of the polynucleotides sequenced, and converted C6 to T in approximately 9.8% of the polynucleotides sequenced. pNMG-90 did not convert A5 to G in any of the polynucleotides sequenced, but converted C6 to T in approximately 13% of the polynucleotides sequenced. In another example, base editor pNMG-93 converted A5 to G in 77% of the polynucleotides sequenced and C6 to T in approximately 13% of the polynucleotides sequenced. In another example, base editor pNMG-91 converted C6 to Gin approximately 17% of the polynucleotides sequenced, and C6 to T in 58% of the polynucleotides sequenced. Other base editors include CDA BEmax, CDAmax, and ABE. ABEmax converted C6 to G or T in approximately 8% or 61% of polynucleotides sequenced, respectively (FIG. 8A, 8B). CDAmax converted C to G or T in approximately 5% or 43%, respectively. ABE converted A5 to G in approximately 80% of polynucleotides sequenced and A8 to G in approximately 10% of polynucleotides sequenced.

[0559] The base editing activities of a variety of base editors shown in FIG. 4A was evaluated on an HBG1 target site (FIG. 4B, 4C). pNMG-B79 converted A5 to G in approximately 23% of the polynucleotides sequenced, and converted C6 to T in approximately 8% of the polynucleotides sequenced. pNMG-B92 converted A5 to G in 15% of the polynucleotides sequenced, and converted C6 to T in approximately 9.8% of the polynucleotides sequenced. pNMG-90 did not convert A5 to Gin any of the polynucleotides sequenced, but converted C6 to T in approximately 4% of the polynucleotides sequenced and converted C7 to T in approximately 15% of polynucleotides sequenced and converted A8 to G in about 2% of polynucleotides sequenced. In another example, base editor pNMG-B93 converted A5 to G in 19% of the polynucleotides sequenced, C6 to T in approximately 20% of the polynucleotides sequenced, C7 to T in approximately 18% of polynucleotides sequence, and A8 to G in 16% of polynucleotides sequenced. In another example, base editor pNMG-90 converted C6 to Gin approximately 8% of the polynucleotides sequenced, and C7 to T in 28% of the polynucleotides sequenced. BEmax converted C6 to T in approximately 27% of polynucleotides sequenced, and C7 to T in approximately 35% of polynucleotides sequenced. ABE converted A5 to G in approximately 35% of polynucleotides sequenced; A8 to Gin approximately 47% of polynucleotides sequenced; and A9 to Gin 8.6 percent of polynucleotides sequenced.

[0560] The activities of dual nucleobase editor pNMG-79 and conventional nucleobase editor ABE7.10 were tested on the HBG1 site. ABE7.10 results are shown at the top of FIG. 5A, 5B, and untreated control results are shown at the bottom of the figure. pNMG-B79 converted C4 to T in 41% of polynucleotides sequenced; converted A5 to Gin 67% of polynucleotides sequenced, C6 to T in 35% of polynucleotides sequenced, and A to Gin approximately 15% of polynucleotides sequenced. FIG. 5B provides exemplary sequencing reads of the results summarized in FIG. 5A. FIG. 5C provides a complete list of sequencing reads for pNMG-B79 relative to ABE7.10. pNMG-B79 generated indels at the rate of 2.68%, while ABE7.10 generated indels at the rate of 0.56% under similar conditions (FIG. 6).

[0561] A variety of multi-effector nucleobase editors were tested against an HBG1 target. The ability of these base editors to modify the target is shown in FIGS. 7A and 7B. The percent of indels generated is shown at the far right of the figure.

[0562] As evidenced by the results, the nucleobase editors that were tested successfully deaminated both As and Cs in the editing window of a given target. Amplicons show A→G and C→T on the same amplicon. Use of CDA or Apolipoprotein B mRNA Editing Catalytic Polypeptide-like (rAPOBEC1) are also able to be tested on the desired site.

[0563] The Multi-Effector Nucleobase Editors described above are further modified by inserting into the vectors a uracil-DNA glycosylase.

### Other Embodiments

[0564] From the foregoing description, it will be apparent that variations and modifications may be made to the invention described herein to adopt it to various usages and conditions. Such embodiments are also within the scope of the following claims.

[0565] The recitation of a listing of elements in any definition of a variable herein includes definitions of that variable as any single element or combination (or subcombination) of listed elements. The recitation of an embodiment herein includes that embodiment as any single embodiment or in combination with any other embodiments or portions thereof.

### INCORPORATION BY REFERENCE

[0566] All publications, patents, and patent applications mentioned in this specification are herein incorporated by reference to the same extent as if each individual publication, patent, or patent application was specifically and individually indicated to be incorporated by reference. Absent any indication otherwise, publications, patents, and patent applications mentioned in this specification are incorporated herein by reference in their entireties.

The application's sequence listing, which the Patent Office published only in electronic form, follows.

SEQUENCE LISTING (730 sequences)

SEQ ID NO: 1 - protein, 304 aa, Homo sapiens
MGVFCLGPWGLGRKLRTPGKGPLQLLSRLCGDHLQAIPAKKAPAGQEEPGTPPSSPLSAEQLDRIQRNKAAALLRLAARNVPVGFGESWKKHLSGEFGKPYFIKLMGFVAEERKHYTVYPPPHQVFTWTQMCDIKDVKVVILGQDPYHGPNQAHGLCFSVQRPVPPPPSLENIYKELSTDIEDFVHPGHGDLSGWAKQGVLLLNAVLTVRAHQANSHKERGWEQFTDAVVSWLNQNSNGLVFLLWGSYAQKKGSAIDRKRHHVLQTAHPSPLSVYRGFFGCRHFSKTNELLQKSGKKPIDWKEL

SEQ ID NO: 2 - protein, 313 aa, Homo sapiens
MIGQKTLYSFFSPSPARKRHAPSPEPAVQGTGVAGVPEESGDAAAIPAKKAPAGQEEPGTPPSSPLSAEQLDRIQRNKAAALLRLAARNVPVGFGESWKKHLSGEFGKPYFIKLMGFVAEERKHYTVYPPPHQVFTWTQMCDIKDVKVVILGQDPYHGPNQAHGLCFSVQRPVPPPPSLENIYKELSTDIEDFVHPGHGDLSGWAKQGVLLLNAVLTVRAHQANSHKERGWEQFTDAVVSWLNQNSNGLVFLLWGSYAQKKGSAIDRKRHHVLQTAHPSPLSVYRGFFGCRHFSKTNELLQKSGKKPIDWKEL

SEQ ID NO: 3 - protein, 167 aa, Artificial Sequence
  Description of Artificial Sequence: Synthetic polypeptide
MSEVEFSHEYWMRHALTLAKRARDEREVPVGAVLVLNNRVIGEGWNRAIGLHDPTAHAEIMALRQGGLVMQNYRLIDATLYVTFEPCVMCAGAMIHSRIGRVVFGVRNAKTGAAGSLMDVLHYPGMNHRVEITEGILADECAALLCYFFRMPRQVFNAQKKAQSSTD

SEQ ID NO: 4 - protein, 160 aa, Staphylococcus aureus
MGSHMTNDIYFMTLAIEEAKKAAQLGEVPIGAIITKDDEVIARAHNLRETLQQPTAHAEHIAIERAAKVLGSWRLEGCTLYVTLEPCVMCAGTIVMSRIPRVVYGADDPKGGCSGSLMNLLQQSNFNHRAIVDKGVLKEACSTLLTTFFKNLRANKKSTN

SEQ ID NO: 5 - protein, 161 aa, Bacillus subtilis
MTQDELYMKEAIKEAKKAEEKGEVPIGAVLVINGEIIARAHNLRETEQRSIAHAEMLVIDEACKALGTWRLEGATLYVTLEPCPMCAGAVVLSRVEKVVFGAFDPKGGCSGTLMNLLQEERFNHQAEVVSGVLEEECGGMLSAFFRELRKKKKAARKNLSE

SEQ ID NO: 6 - protein, 183 aa, Salmonella typhimurium
MPPAFITGVTSLSDVELDHEYWMRHALTLAKRAWDEREVPVGAVLVHNHRVIGEGWNRPIGRHDPTAHAEIMALRQGGLVLQNYRLLDTTLYVTLEPCVMCAGAMVHSRIGRVVFGARDAKTGAAGSLIDVLHHPGMNHRVEIIEGVLRDECATLLSDFFRMRRQEIKALKKADRAEGAGPAV

SEQ ID NO: 7 - protein, 164 aa, Shewanella putrefaciens
MDEYWMQVAMQMAEKAEAAGEVPVGAVLVKDGQQIATGYNLSISQHDPTAHAEILCLRSAGKKLENYRLLDATLYITLEPCAMCAGAMVHSRIARVVYGARDEKTGAAGTVVNLLQHPAFNHQVEVTSGVLAEACSAQLSRFFKRRRDEKKALKLAQRAQQGIE

SEQ ID NO: 8 - protein, 173 aa, Haemophilus influenzae
MDAAKVRSEFDEKMMRYALELADKAEALGEIPVGAVLVDDARNIIGEGWNLSIVQSDPTAHAEIIALRNGAKNIQNYRLLNSTLYVTLEPCTMCAGAILHSRIKRLVFGASDYKTGAIGSRFHFFDDYKMNHTLEITSGVLAEECSQKLSTFFQKRREEKKIEKALLKSLSDK

SEQ ID NO: 9 - protein, 161 aa, Caulobacter crescentus
MRTDESEDQDHRMMRLALDAARAAAEAGETPVGAVILDPSTGEVIATAGNGPIAAHDPTAHAEIAAMRAAAAKLGNYRLTDLTLVVTLEPCAMCAGAISHARIGRVVFGADDPKGGAVVHGPKFFAQPTCHWRPEVTGGVLADESADLLRGFFRARRKAKI

SEQ ID NO: 10 - protein, 179 aa, Geobacter sulfurreducens
MSSLKKTPIRDDAYWMGKAIREAAKAAARDEVPIGAVIVRDGAVIGRGHNLREGSNDPSAHAEMIAIRQAARRSANWRLTGATLYVTLEPCLMCMGAIILARLERVVFGCYDPKGGAAGSLYDLSADPRLNHQVRLSPGVCQEECGTMLSDFFRDLRRRKKAKATPALFIDERKVPPEP

SEQ ID NO: 11 - protein, 167 aa, Artificial Sequence; identical to SEQ ID NO: 3
  Description of Artificial Sequence: Synthetic polypeptide

SEQ ID NO: 12 - DNA, 8877 bp, Artificial Sequence
  Description of Artificial Sequence: Synthetic polynucleotide
atatgccaagtacgccccctattgacgtcaatgacggtaaatggcccgcctggcattatgcccagtacatgaccttatgggactttcctacttggcagtacatctacgtattagtcatcgctattaccatggtgatgcggttttggcagtacatcaatgggcgtggatagcggtttgactcacggggatttccaagtctccaccccattgacgtcaatgggagtttgttttggcaccaaaatcaacgggactttccaaaatgtcgtaacaactccgccccattgacgcaaatgggcggtaggcgtgtacggtgggaggtctatataagcagagctggtttagtgaaccgtcagatccgctagagatccgcggccgctaatacgactcactatagggagagccgccaccatgagctcagagactggcccagtggctgtggaccccacattgagacggcggatcgagccccatgagtttgaggtattcttcgatccgagagagctccgcaaggagacctgcctgctttacgaaattaattgggggggccggcactccatttggcgacatacatcacagaacactaacaagcacgtcgaagtcaacttcatcgagaagttcacgacagaaagatatttctgtccgaacacaaggtgcagcattacctggtttctcagctggagcccatgcggcgaatgtagtagggccatcactgaattcctgtcaaggtatccccacgtcactctgtttatttacatcgcaaggctgtaccaccacgctgacccccgcaatcgacaaggcctgcgggatttgatctcttcaggtgtgactatccaaattatgactgagcaggagtcaggatactgctggagaaactttgtgaattatagcccgagtaatgaagcccactggcctaggtatccccatctgtgggtacgactgtacgttcttgaactgtactgcatcatactgggcctgcctccttgtctcaacattctgagaaggaagcagccacagctgacattctttaccatcgctcttcagtcttgtcattaccagcgactgcccccacacattctctgggccaccgggttgaaatctggtggttcttctggtggttctagcggcagcgagactcccgggacctcagagtccgccacacccgaaagttctggtggttcttctggtggttctgataaaaagtattctattggtttagccatcggcactaattccgttggatgggctgtcataaccgatgaatacaaagtaccttcaaagaaatttaaggtgttggggaacacagaccgtcattcgattaaaaagaatcttatcggtgccctcctattcgatagtggcgaaacggcagaggcgactcgcctgaaacgaaccgctcggagaaggtatacacgtcgcaagaaccgaatatgttacttacaagaaatttttagcaatgagatggccaaagttgacgattctttctttcaccgtttggaagagtccttccttgtcgaagaggacaagaaacatgaacggcaccccatctttggaaacatagtagatgaggtggcatatcatgaaaagtacccaacgatttatcacctcagaaaaaagctagttgactcaactgataaagcggacctgaggttaatctacttggctcttgcccatatgataaagttccgtgggcactttctcattgagggtgatctaaatccggacaactcggatgtcgacaaactgttcatccagttagtacaaacctataatcagttgtttgaagagaaccctataaatgcaagtggcgtggatgcgaaggctattcttagcgcccgcctctctaaatcccgacggctagaaaacctgatcgcacaattacccggagagaagaaaaatgggttgttcggtaaccttatagcgctctcactaggcctgacaccaaattttaagtcgaacttcgacttagctgaagatgccaaattgcagcttagtaaggacacgtacgatgacgatctcgacaatctactggcacaaattggagatcagtatgcggacttatttttggctgccaaaaaccttagcgatgcaatcctcctatctgacatactgagagttaatactgagattaccaaggcgccgttatccgcttcaatgatcaaaaggtacgatgaacatcaccaagacttgacacttctcaaggccctagtccgtcagcaactgcctgagaaatataaggaaatattctttgatcagtcgaaaaacgggtacgcaggttatattgacggcggagcgagtcaagaggaattctacaagtttatcaaacccatattagagaagatggatgggacggaagagttgcttgtaaaactcaatcgcgaagatctactgcgaaagcagcggactttcgacaacggtagcattccacatcaaatccacttaggcgaattgcatgctatacttagaaggcaggaggatttttatccgttcctcaaagacaatcgtgaaaagattgagaaaatcctaacctttcgcataccttactatgtgggacccctggcccgagggaactctcggttcgcatggatgacaagaaagtccgaagaaacgattactccatggaattttgaggaagttgtcgataaaggtgcgtcagctcaatcgttcatcgagaggatgaccaactttgacaagaatttaccgaacgaaaaagtattgcctaagcacagtttactttacgagtatttcacagtgtacaatgaactcacgaaagttaagtatgtcactgagggcatgcgtaaacccgcctttctaagcggagaacagaagaaagcaatagtagatctgttattcaagaccaaccgcaaagtgacagttaagcaattgaaagaggactactttaagaaaattgaatgcttcgattctgtcgagatctccggggtagaagatcgatttaatgcgtcacttggtacgtatcatgacctcctaaagataattaaagataaggacttcctggataacgaagagaatgaagatatcttagaagatatagtgttgactcttaccctctttgaagatcgggaaatgattgaggaaagactaaaaacatacgctcacctgttcgacgataaggttatgaaacagttaaagaggcgtcgctatacgggctggggacgattgtcgcggaaacttatcaacgggataagagacaagcaaagtggtaaaactattctcgattttctaaagagcgacggcttcgccaataggaactttatgcagctgatccatgatgactctttaaccttcaaagaggatatacaaaaggcacaggtttccggacaaggggactcattgcacgaacatattgcgaatcttgctggttcgccagccatcaaaaagggcatactccagacagtcaaagtagtggatgagctagttaaggtcatgggacgtcacaaaccggaaaacattgtaatcgagatggcacgcgaaaatcaaacgactcagaaggggcaaaaaaacagtcgagagcggatgaagagaatagaagagggtattaaagaactgggcagccagatcttaaaggagcatcctgtggaaaatacccaattgcagaacgagaaactttacctctattacctacaaaatggaagggacatgtatgttgatcaggaactggacataaaccgtttatctgattacgacgtcgatcacattgtaccccaatcctttttgaaggacgattcaatcgacaataaagtgcttacacgctcggataagaaccgagggaaaagtgacaatgttccaagcgaggaagtcgtaaagaaaatgaagaactattggcggcagctcctaaatgcgaaactgataacgcaaagaaagttcgataacttaactaaagctgagaggggtggcttgtctgaacttgacaaggccggatttattaaacgtcagctcgtggaaacccgccaaatcacaaagcatgttgcacagatactagattcccgaatgaatacgaaatacgacgagaacgataagctgattcgggaagtcaaagtaatcactttaaagtcaaaattggtgtcggacttcagaaaggattttcaattctataaagttagggagataaataactaccaccatgcgcacgacgcttatcttaatgccgtcgtagggaccgcactcattaagaaatacccgaagctagaaagtgagtttgtgtatggtgattacaaagtttatgacgtccgtaagatgatcgcgaaaagcgaacaggagataggcaaggctacagccaaatacttcttttattctaacattatgaatttctttaagacggaaatcactctggcaaacggagagatacgcaaacgacctttaattgaaaccaatggggagacaggtgaaatcgtatgggataagggccgggacttcgcgacggtgagaaaagttttgtccatgccccaagtcaacatagtaaagaaaactgaggtgcagaccggagggttttcaaaggaatcgattcttccaaaaaggaatagtgataagctcatcgctcgtaaaaaggactgggacccgaaaaagtacggtggcttcgatagccctacagttgcctattctgtcctagtagtggcaaaagttgagaagggaaaatccaagaaactgaagtcagtcaaagaattattggggataacgattatggagcgctcgtcttttgaaaagaaccccatcgacttccttgaggcgaaaggttacaaggaagtaaaaaaggatctcataattaaactaccaaagtatagtctgtttgagttagaaaatggccgaaaacggatgttggctagcgccggagagcttcaaaaggggaacgaactcgcactaccgtctaaatacgtgaatttcctgtatttagcgtcccattacgagaagttgaaaggttcacctgaagataacgaacagaagcaactttttgttgagcagcacaaacattatctcgacgaaatcatagagcaaatttcggaattcagtaagagagtcatcctagctgatgccaatctggacaaagtattaagcgcatacaacaagcacagggataaacccatacgtgagcaggcggaaaatattatccatttgtttactcttaccaacctcggcgctccagccgcattcaagtattttgacacaacgatagatcgcaaacgatacacttctaccaaggaggtgctagacgcgacactgattcaccaatccatcacgggattatatgaaactcggatagatttgtcacagcttgggggtgactctggtggttctggaggatctggtggttctactaatctgtcagatattattgaaaaggagaccggtaagcaactggttatccaggaatccatcctcatgctcccagaggaggtggaagaagtcattgggaacaagccggaaagcgatatactcgtgcacaccgcctacgacgagagcaccgacgagaatgtcatgcttctgactagcgacgcccctgaatacaagccttgggctctggtcatacaggatagcaacggtgagaacaagattaagatgctctctggtggttctggaggatctggtggttctactaatctgtcagatattattgaaaaggagaccggtaagcaactggttatccaggaatccatcctcatgctcccagaggaggtggaagaagtcattgggaacaagccggaaagcgatatactcgtgcacaccgcctacgacgagagcaccgacgagaatgtcatgcttctgactagcgacgcccctgaatacaagccttgggctctggtcatacaggatagcaacggtgagaacaagattaagatgctctctggtggttctcccaagaagaagaggaaagtctaaccggtcatcatcaccatcaccattgagtttaaacccgctgatcagcctcgactgtgccttctagttgccagccatctgttgtttgcccctcccccgtgccttccttgaccctggaaggtgccactcccactgtcctttcctaataaaatgaggaaattgcatcgcattgtctgagtaggtgtcattctattctggggggtggggtggggcaggacagcaagggggaggattgggaagacaatagcaggcatgctggggatgcggtgggctctatggcttctgaggcggaaagaaccagctggggctcgataccgtcgacctctagctagagcttggcgtaatcatggtcatagctgtttcctgtgtgaaattgttatccgctcacaattccacacaacatacgagccggaagcataaagtgtaaagcctagggtgcctaatgagtgagctaactcacattaattgcgttgcgctcactgcccgctttccagtcgggaaacctgtcgtgccagctgcattaatgaatcggccaacgcgcggggagaggcggtttgcgtattgggcgctcttccgcttcctcgctcactgactcgctgcgctcggtcgttcggctgcggcgagcggtatcagctcactcaaaggcggtaatacggttatccacagaatcaggggataacgcaggaaagaacatgtgagcaaaaggccagcaaaaggccaggaaccgtaaaaaggccgcgttgctggcgtttttccataggctccgcccccctgacgagcatcacaaaaatcgacgctcaagtcagaggtggcgaaacccgacaggactataaagataccaggcgtttccccctggaagctccctcgtgcgctctcctgttccgaccctgccgcttaccggatacctgtccgcctttctcccttcgggaagcgtggcgctttctcatagctcacgctgtaggtatctcagttcggtgtaggtcgttcgctccaagctgggctgtgtgcacgaaccccccgttcagcccgaccgctgcgccttatccggtaactatcgtcttgagtccaacccggtaagacacgacttatcgccactggcagcagccactggtaacaggattagcagagcgaggtatgtaggcggtgctacagagttcttgaagtggtggcctaactacggctacactagaagaacagtatttggtatctgcgctctgctgaagccagttaccttcggaaaaagagttggtagctcttgatccggcaaacaaaccaccgctggtagcggtggtttttttgtttgcaagcagcagattacgcgcagaaaaaaaggatctcaagaagatcctttgatcttttctacggggtctgacgctcagtggaacgaaaactcacgttaagggattttggtcatgagattatcaaaaaggatcttcacctagatccttttaaattaaaaatgaagttttaaatcaatctaaagtatatatgagtaaacttggtctgacagttaccaatgcttaatcagtgaggcacctatctcagcgatctgtctatttcgttcatccatagttgcctgactccccgtcgtgtagataactacgatacgggagggcttaccatctggccccagtgctgcaatgataccgcgagacccacgctcaccggctccagatttatcagcaataaaccagccagccggaagggccgagcgcagaagtggtcctgcaactttatccgcctccatccagtctattaattgttgccgggaagctagagtaagtagttcgccagttaatagtttgcgcaacgttgttgccattgctacaggcatcgtggtgtcacgctcgtcgtttggtatggcttcattcagctccggttcccaacgatcaaggcgagttacatgatcccccatgttgtgcaaaaaagcggttagctccttcggtcctccgatcgttgtcagaagtaagttggccgcagtgttatcactcatggttatggcagcactgcataattctcttactgtcatgccatccgtaagatgcttttctgtgactggtgagtactcaaccaagtcattctgagaatagtgtatgcggcgaccgagttgctcttgcccggcgtcaatacgggataataccgcgccacatagcagaactttaaaagtgctcatcattggaaaacgttcttcggggcgaaaactctcaaggatcttaccgctgttgagatccagttcgatgtaacccactcgtgcacccaactgatcttcagcatcttttactttcaccagcgtttctgggtgagcaaaaacaggaaggcaaaatgccgcaaaaaagggaataagggcgacacggaaatgttgaatactcatactcttcctttttcaatattattgaagcatttatcagggttattgtctcatgagcggatacatatttgaatgtatttagaaaaataaacaaataggggttccgcgcacatttccccgaaaagtgccacctgacgtcgacggatcgggagatcgatctcccgatcccctagggtcgactctcagtacaatctgctctgatgccgcatagttaagccagtatctgctccctgcttgtgtgttggaggtcgctgagtagtgcgcgagcaaaatttaagctacaacaaggcaaggcttgaccgacaattgcatgaagaatctgcttagggttaggcgttttgcgctgcttcgcgatgtacgggccagatatacgcgttgacattgattattgactagttattaatagtaatcaattacggggtcattagttcatagcccatatatggagttccgcgttacataacttacggtaaatggcccgcctggctgaccgcccaacgacccccgcccattgacgtcaataatgacgtatgttcccatagtaacgccaatagggactttccattgacgtcaatgggtggagtatttacggtaaactgcccacttggcagtacatcaagtgtatc

SEQ ID NO: 13 - DNA, 5508 bp, Artificial Sequence
  Description of Artificial Sequence: Synthetic polynucleotide
atgagctcagagactggcccagtggctgtggaccccacattgagacggcggatcgagccccatgagtttgaggtattcttcgatccgagagagctccgcaaggagacctgcctgctttacgaaattaattgggggggccggcactccatttggcgacatacatcacagaacactaacaagcacgtcgaagtcaacttcatcgagaagttcacgacagaaagatatttctgtccgaacacaaggtgcagcattacctggtttctcagctggagccgcgaatgtagtagggccatcactgaattcctgtcaaggtatccccacgtcactctgtttatttacatcgcaaggctgtaccaccacgctgacccccgcaatcgacaaggcctgcgggatttgatctcttcaggtgtgactatccaaattatgactgagcaggagtcaggatactgctggagaaactttgtgaattatagcccgagtaatgaagcccactggcctaggtatccccatctgtgggtacgactgtacgttcttgaactgtactgcatcatactgggcctgcctccttgtctcaacattctgagaaggaagcagccacagctgacattctttaccatcgctcttcagtcttgtcattaccagcgactgcccccacacattctctgggccaccgggttgaaatctggtggttcttctggtggttctagcggcagcgagactcccgggacctcagagtccgccacacccgaaagttctggtggttcttctggtggttctgataaaaagtattctattggtttagccatcggcactaattccgttggatgggctgtcataaccgatgaatacaaagtaccttcaaagaaatttaaggtgttggggaacacagaccgtcattcgattaaaaagaatcttatcggtgccctcctattcgatagtggcgaaacggcagaggcgactcgcctgaaacgaaccgctcggagaaggtatacacgtcgcaagaaccgaatatgttacttacaagaaatttttagcaatgagatggccaaagttgacgattctttctttcaccgtttggaagagtccttccttgtcgaagaggacaagaaacatgaacggcaccccatctttggaaacatagtagatgaggtggcatatcatgaaaagtacccaacgatttatcacctcagaaaaaagctagttgactcaactgataaagcggacctgaggttaatctacttggctcttgcccatatgataaagttccgtgggcactttctcattgagggtgatctaaatccggacaactcggatgtcgacaaactgttcatccagttagtacaaacctataatcagttgtttgaagagaaccctataaatgcaagtggcgtggatgcgaaggctattcttagcgcccgcctctctaaatcccgacggctagaaaacctgatcgcacaattacccggagagaagaaaaatgggttgttcggtaaccttatagcgctctcactaggcctgacaccaaattttaagtcgaacttcgacttagctgaagatgccaaattgcagcttagtaaggacacgtacgatgacgatctcgacaatctactggcacaaattggagatcagtatgcggacttatttttggctgccaaaaaccttagcgatgcaatcctcctatctgacatactgagagttaatactgagattaccaaggcgccgttatccgcttcaatgatcaaaaggtacgatgaacatcaccaagacttgacacttctcaaggccctagtccgtcagcaactgcctgagaaatataaggaaatattctttgatcagtcgaaaaacgggtacgcaggttatattgacggcggagcgagtcaagaggaattctacaagtttatcaaacccatattagagaagatggatgggacggaagagttgcttgtaaaactcaatcgcgaagatctactgcgaaagcagcggactttcgacaacggtagcattccacatcaaatccacttaggcgaattgcatgctatacttagaaggcaggaggatttttatccgttcctcaaagacaatcgtgaaaagattgagaaaatcctaacctttcgcataccttactatgtgggacccctggcccgagggaactctcggttcgcatggatgacaagaaagtccgaagaaacgattactccatggaattttgaggaagttgtcgataaaggtgcgtcagctcaatcgttcatcgagaggatgaccaactttgacaagaatttaccgaacgaaaaagtattgcctaagcacagtttactttacgagtatttcacagtgtacaatgaactcacgaaagttaagtatgtcactgagggcatgcgtaaacccgcctttctaagcggagaacagaagaaagcaatagtagatctgttattcaagaccaaccgcaaagtgacagttaagcaattgaaagaggactactttaagaaaattgaatgcttcgattctgtcgagatctccggggtagaagatcgatttaatgcgtcacttggtacgtatcatgacctcctaaagataattaaagataaggacttcctggataacgaagagaatgaagatatcttagaagatatagtgttgactcttaccctctttgaagatcgggaaatgattgaggaaagactaaaaacatacgctcacctgttcgacgataaggttatgaaacagttaaagaggcgtcgctatacgggctggggacgattgtcgcggaaacttatcaacgggataagagacaagcaaagtggtaaaactattctcgattttctaaagagcgacggcttcgccaataggaactttatgcagctgatccatgatgactctttaaccttcaaagaggatatacaaaaggcacaggtttccggacaaggggactcattgcacgaacatattgcgaatcttgctggttcgccagccatcaaaaagggcatactccagacagtcaaagtagtggatgagctagttaaggtcatgggacgtcacaaaccggaaaacattgtaatcgagatggcacgcgaaaatcaaacgactcagaaggggcaaaaaaacagtcgagagcggatgaagagaatagaagagggtattaaagaactgggcagccagatcttaaaggagcatcctgtggaaaatacccaattgcagaacgagaaactttacctctattacctacaaaatggaagggacatgtatgttgatcaggaactggacataaaccgtttatctgattacgacgtcgatcacattgtaccccaatcctttttgaaggacgattcaatcgacaataaagtgcttacacgctcggataagaaccgagggaaaagtgacaatgttccaagcgaggaagtcgtaaagaaaatgaagaactattggcggcagctcctaaatgcgaaactgataacgcaaagaaagttcgataacttaactaaagctgagaggggtggcttgtctgaacttgacaaggccggatttattaaacgtcagctcgtggaaacccgccaaatcacaaagcatgttgcacagatactagattcccgaatgaatacgaaatacgacgagaacgataagctgattcgggaagtcaaagtaatcactttaaagtcaaaattggtgtcggacttcagaaaggattttcaattctataaagttagggagataaataactaccaccatgcgcacgacgcttatcttaatgccgtcgtagggaccgcactcattaagaaatacccgaagctagaaagtgagtttgtgtatggtgattacaaagtttatgacgtccgtaagatgatcgcgaaaagcgaacaggagataggcaaggctacagccaaatacttcttttattctaacattatgaatttctttaagacggaaatcactctggcaaacggagagatacgcaaacgacctttaattgaaaccaatggggagacaggtgaaatcgtatgggataagggccgggacttcgcgacggtgagaaaagttttgtccatgccccaagtcaacatagtaaagaaaactgaggtgcagaccggagggttttcaaaggaatcgattcttccaaaaaggaatagtgataagctcatcgctcgtaaaaaggactgggacccgaaaaagtacggtggcttcgatagccctacagttgcctattctgtcctagtagtggcaaaagttgagaagggaaaatccaagaaactgaagtcagtcaaagaattattggggataacgattatggagcgctcgtcttttgaaaagaaccccatcgacttccttgaggcgaaaggttacaaggaagtaaaaaaggatctcataattaaactaccaaagtatagtctgtttgagttagaaaatggccgaaaacggatgttggctagcgccggagagcttcaaaaggggaacgaactcgcactaccgtctaaatacgtgaatttcctgtatttagcgtcccattacgagaagttgaaaggttcacctgaagataacgaacagaagcaactttttgttgagcagcacaaacattatctcgacgaaatcatagagcaaatttcggaattcagtaagagagtcatcctagctgatgccaatctggacaaagtattaagcgcatacaacaagcacagggataaacccatacgtgagcaggcggaaaatattatccatttgtttactcttaccaacctcggcgctccagccgcattcaagtattttgacacaacgatagatcgcaaacgatacacttctaccaaggaggtgctagacgcgacactgattcaccaatccatcacgggattatatgaaactcggatagatttgtcacagcttgggggtgactctggtggttctggaggatctggtggttctactaatctgtcagatattattgaaaaggagaccggtaagcaactggttatccaggaatccatcctcatgctcccagaggaggtggaagaagtcattgggaacaagccggaaagcgatatactcgtgcacaccgcctacgacgagagcaccgacgagaatgtcatgcttctgactagcgacgcccctgaatacaagccttgggctctggtcatacaggatagcaacggtgagaacaagattaagatgctctctggtggttctggaggatctggtggttctactaatctgtcagatattattgaaaaggagaccggtaagcaactggttatccaggaatccatcctcatgctcccagaggaggtggaagaagtcattgggaacaagccggaaagcgatatactcgtgcacaccgcctacgacgagagcaccgacgagaatgtcatgcttctgactagcgacgcccctgaatacaagccttgggctctggtcatacaggatagcaacggtgagaacaagattaagatgctctctggtggttctaaaaggacggcggacggatcagagttcgagagtccgaaaaaaaaacgaaaggtcgaataa

SEQ ID NO: 14 - DNA, 5514 bp, Artificial Sequence
  Description of Artificial Sequence: Synthetic polynucleotide
atgtcatccgaaaccgggccagtggccgtagacccaacactcaggaggcggatagaaccccatgagtttgaagtgttcttcgaccccagagagctgcgcaaagagacttgcctcctgtatgaaataaattgggggggtcgccattcaatttggaggcacactagccagaatactaacaaacacgtggaggtaaattttatcgagaagtttaccaccgaaagatacttttgccccaatacacggtgttcaattacctggtttctgtcatggagtccatgtggagaatgtagtagagcgataactgagttcctgtctcgatatcctcacgtcacgttgtttatatacatcgctcggctttatcaccatgcggacccgcggaacaggcaaggtcttcgggacctcatatcctctggggtgaccatccagataatgacggagcaagagagcggatactgctggcgaaactttgttaactacagcccaagcaatgaggcacactggcctagatatccgcatctctgggttcgactgtatgtccttgaactgtactgcataattctgggacttccgccatgcttgaacattctgcggcggaaacaaccacagctgacctttttcacgattgctctccaaagttgtcactaccagcgattgccaccccacatcttgtgggctactggactcaagtctggaggaagttcaggcggaagcagcgggtctgaaacgcccggaacctcagagagcgcaacgcccgaaagctctggagggtcaagtggtggtagtgataagaaatactccatcggcctcgccatcggtacgaattctgtcggttgggccgttatcaccgatgagtacaaggtcccttctaagaaattcaaggttttgggcaatacagaccgccattctataaaaaaaaacctgatcggcgcccttttgtttgacagtggtgagactgctgaagcgactcgcctgaagcgaactgccaggaggcggtatacgaggcgaaaaaaccgaatttgttacctccaggagattttctcaaatgaaatggccaaggtagatgatagtttttttcaccgcttggaagaaagttttctcgttgaggaggacaaaaagcacgagaggcacccaatctttggcaacatagtcgatgaggtcgcataccatgagaaatatcctacgatctatcatctccgcaagaagctggtcgatagcacggataaagctgacctccggctgatctaccttgctcttgctcacatgattaaattcaggggccatttcctgatagaaggagacctcaatcccgacaattctgatgtcgacaaactgtttattcagctcgttcagacctataatcaactctttgaggagaaccccatcaatgcttcaggggtggacgcaaaggccattttgtccgcgcgcttgagtaaatcacgacgcctcgagaatttgatagctcaactgccgggtgagaagaaaaacgggttgtttgggaatctcatagcgttgagtttgggacttacgccaaactttaagtctaactttgatttggccgaagatgccaaattgcagctgtccaaagatacctatgatgacgacttggataaccttcttgcgcagattggtgaccaatacgcggatctgtttcttgccgcaaaaaatctgtccgacgccatactcttgtccgatatactgcgcgtcaatactgagataactaaggctcccctcagcgcgtccatgattaaaagatacgatgagcaccaccaagatctcactctgttgaaagccctggttcgccagcagcttccagagaagtataaggagatatttttcgaccaatctaaaaacggctatgcgggttacattgacggtggcgcctctcaagaagaattctacaagtttataaagccgatacttgagaaaatggacggtacagaggaattgttggttaagctcaatcgcgaggacttgttgagaaagcagcgcacatttgacaatggtagtattccacaccagattcatctgggcgagttgcatgccattcttagaagacaagaagatttttatccgtttctgaaagataacagagaaaagattgaaaagatacttacctttcgcataccgtattatgtaggtcccctggctagagggaacagtcgcttcgcttggatgactcgaaaatcagaagaaacaataaccccctggaattttgaagaagtggtagataaaggtgcgagtgcccaatcttttattgagcggatgacaaattttgacaagaatctgcctaacgaaaaggtgcttcccaagcattcccttttgtatgaatactttacagtatataatgaactgactaaagtgaagtacgttaccgaggggatgcgaaagccagcttttctcagtggcgagcagaaaaaagcaatagttgacctgctgttcaagacgaataggaaggttaccgtcaaacagctcaaagaagattactttaaaaagatcgaatgttttgattcagttgagataagcggagtagaggatagatttaacgcaagtcttggaacttatcatgaccttttgaagatcatcaaggataaagattttttggacaacgaggagaatgaagatatcctggaagatatagtacttaccttgacgctttttgaagatcgagagatgatcgaggagcgacttaagacgtacgcacatctctttgacgataaggttatgaaacaattgaaacgccggcggtatactggctggggcaggctttctcgaaagctgattaatggtatccgcgataagcagtctggaaagacaatccttgactttctgaaaagtgatggatttgcaaatagaaactttatgcagcttatacatgatgactctttgacgttcaaggaagacatccagaaggcacaggtatccggccaaggggatagcctccatgaacacatagccaacctggccggctcaccagctattaaaaagggaatattgcaaaccgttaaggttgttgacgaactcgttaaggttatgggccgacacaaaccagagaatatcgtgattgagatggctagggagaatcagaccactcaaaaaggtcagaaaaattctcgcgaaaggatgaagcgaattgaagagggaatcaaagaacttggctctcaaattttgaaagagcacccggtagaaaacactcagctgcagaatgaaaagctgtatctgtattatctgcagaatggtcgagatatgtacgttgatcaggagctggatatcaataggctcagtgactacgatgtcgaccacatcgttcctcaatctttcctgaaagatgactctatcgacaacaaagtgttgacgcgatcagataagaaccggggaaaatccgacaatgtaccctcagaagaagttgtcaagaagatgaaaaactattggagacaattgctgaacgccaagctcataacacaacgcaagttcgataacttgacgaaagccgaaagaggtgggttgtcagaattggacaaagctggctttattaagcgccaattggtggagacccggcagattacgaaacacgtagcacaaattttggattcacgaatgaataccaaatacgacgaaaacgacaaattgatacgcgaggtgaaagtgattacgcttaagagtaagttggtttccgatttcaggaaggattttcagttttacaaagtaagagaaataaacaactaccaccacgcccatgatgcttacctcaacgcggtagttggcacagctcttatcaaaaaatatccaaagctggaaagcgagttcgtttacggtgactataaagtatacgacgttcggaagatgatagccaaatcagagcaggaaattgggaaggcaaccgcaaaatacttcttctattcaaacatcatgaacttctttaagacggagattacgctcgcgaacggcgaaatacgcaagaggcccctcatagagactaacggcgaaaccggggagatcgtatgggacaaaggacgggactttgcgaccgttagaaaagtactttcaatgccacaagtgaatattgttaaaaagacagaagtacaaacaggggggttcagtaaggaatccattttgcccaagcggaacagtgataaattgatagcaaggaaaaaagattgggaccctaagaagtacggtggtttcgactctcctaccgttgcatattcagtccttgtagttgcgaaagtggaaaaggggaaaagtaagaagcttaagagtgttaaagagcttctgggcataaccataatggaacggtctagcttcgagaaaaatccaattgactttctcgaggctaaaggttacaaggaggtaaaaaaggacctgataattaaactcccaaagtacagtctcttcgagttggagaatgggaggaagagaatgttggcatctgcaggggagctccaaaaggggaacgagctggctctgccttcaaaatacgtgaactttctgtacctggccagccactacgagaaactcaagggttctcctgaggataacgagcagaaacagctgtttgtagagcagcacaagcattacctggacgagataattgagcaaattagtgagttctcaaaaagagtaatccttgcagacgcgaatctggataaagttctttccgcctataataagcaccgggacaagcctatacgagaacaagccgagaacatcattcacctctttacccttactaatctgggcgcgccggccgccttcaaatacttcgacaccacgatagacaggaaaaggtatacgagtaccaaagaagtacttgacgccactctcatccaccagtctataacagggttgtacgaaacgaggatagatttgtcccagctcggcggcgactcaggagggtcaggcggctccggtggatcaacgaatctttccgacataatcgagaaagaaaccggcaaacagttggtgatccaagaatcaatcctgatgctgcctgaagaagtagaagaggtgattggcaacaaacctgagtctgacattcttgtccacaccgcgtatgacgagagcacggacgagaacgttatgcttctcactagcgacgcccctgagtataaaccatgggcgctggtcatccaagattccaatggggaaaacaagattaagatgcttagtggtgggtctggagggagcggtgggtccacgaacctcagcgacattattgaaaaagagactggtaaacaacttgtaatacaagagtctattctgatgttgcctgaagaggtggaggaggtgattgggaacaaaccggagtctgatatacttgttcataccgcctatgacgaatctactgatgagaatgtgatgcttttaacgtcagacgctcccgagtacaaaccctgggctctggtgattcaggacagcaatggtgagaataagattaaaatgttgagtgggggctcaaagcgcacggctgacggtagcgaatttgagagccccaaaaaaaaacgaaaggtcgaataa

SEQ ID NO: 15 - DNA, 5514 bp, Artificial Sequence
  Description of Artificial Sequence: Synthetic polynucleotide
atgagcagcgagacaggccctgtggctgtggatcctacactgcggagaagaatcgagccccacgagttcgaggtgttcttcgaccccagagagctgcggaaagagacatgcctgctgtacgagatcaactggggcggcagacactctatctggcggcacacaagccagaacaccaacaagcacgtggaagtgaactttatcgagaagtttacgaccgagcggtacttctgccccaacaccagatgcagcatcacctggtttctgagctggtccccttgcggcgagtgcagcagagccatcaccgagtttctgtccagatatccccacgtgaccctgttcatctatatcgcccggctgtaccaccacgccgatcctagaaatagacagggactgcgcgacctgatcagcagcggagtgaccatccagatcatgaccgagcaagagagcggctactgctggcggaacttcgtgaactacagccccagcaacgaagcccactggcctagatatcctcacctgtgggtccgactgtacgtgctggaactgtactgcatcatcctgggcctgcctccatgcctgaacatcctgagaagaaagcagcctcagctgaccttcttcacaatcgccctgcagagctgccactaccagagactgcctccacacatcctgtgggccaccggacttaagagcggaggatctagcggcggctctagcggatctgagacacctggcacaagcgagtctgccacacctgagagtagcggcggatcttctggcggctccgacaagaagtactctatcggactggccatcggcaccaactctgttggatgggccgtgatcaccgacgagtacaaggtgcccagcaagaaattcaaggtgctgggcaacaccgaccggcacagcatcaagaagaatctgatcggcgccctgctgttcgactctggcgaaacagccgaagccaccagactgaagagaaccgccaggcggagatacacccggcggaagaaccggatctgctacctgcaagagatcttcagcaacgagatggccaaggtggacgacagcttcttccacagactggaagagtccttcctggtggaagaggacaagaagcacgagcggcaccccatcttcggcaacatcgtggatgaggtggcctaccacgagaagtaccccaccatctaccacctgagaaagaaactggtggacagcaccgacaaggccgacctgagactgatctacctggctctggcccacatgatcaagttccggggccactttctgatcgagggcgatctgaaccccgacaacagcgacgtggacaagctgttcatccagctggtgcagacctacaaccagctgttcgaggaaaaccccatcaacgcctctggcgtggacgccaaggctatcctgtctgccagactgagcaagagcagaaggctggaaaacctgatcgcccagctgcctggcgagaagaagaatggcctgttcggcaacctgattgccctgagcctgggactgacccctaacttcaagagcaacttcgacctggccgaggatgccaaactgcagctgagcaaggacacctacgacgacgacctggacaatctgctggcccagatcggcgatcagtacgccgacttgtttctggccgccaagaacctgtccgacgccatcctgctgagcgatatcctgagagtgaacaccgagatcacaaaggcccctctgagcgcctctatgatcaagagatacgacgagcaccaccaggatctgaccctgctgaaggccctcgttagacagcagctgccagagaagtacaaagagattttcttcgatcagtccaagaacggctacgccggctacattgatggcggagccagccaagaggaattctacaagttcatcaagcccatcctggaaaagatggacggcaccgaggaactgctggtcaagctgaacagagaggacctgctgcggaagcagcggaccttcgacaatggctctatccctcaccagatccacctgggagagctgcacgccattctgcggagacaagaggacttttacccattcctgaaggacaaccgggaaaagatcgagaagatcctgaccttcaggatcccctactacgtgggaccactggccagaggcaatagcagattcgcctggatgaccagaaagagcgaggaaaccatcacaccctggaacttcgaggaagtggtggacaagggcgccagcgctcagtccttcatcgagcggatgaccaacttcgataagaacctgcctaacgagaaggtgctgcccaagcactccctgctgtatgagtacttcaccgtgtacaacgagctgaccaaagtgaaatacgtgaccgagggaatgagaaagcccgcctttctgagcggcgagcagaaaaaggccattgtggatctgctgttcaagaccaaccggaaagtgaccgtgaagcagctgaaagaggactacttcaagaaaatcgagtgcttcgacagcgtggaaatcagcggcgtggaagatcggttcaatgccagcctgggcacataccacgacctgctgaaaattatcaaggacaaggacttcctggacaacgaagagaacgaggacattctcgaggacatcgtgctgaccctgacactgtttgaggacagagagatgatcgaggaacggctgaaaacatacgcccacctgttcgacgacaaagtgatgaagcaactgaagcggaggcggtacacaggctggggcagactgtctcggaagctgatcaacggcatccgggataagcagtccggcaagacaatcctggatttcctgaagtccgacggcttcgccaacagaaacttcatgcagctgatccacgacgacagcctgacctttaaagaggacatccagaaagcccaggtgtccggccaaggcgattctctgcacgagcacattgccaacctggccggatctcccgccattaagaagggcatcctgcagacagtgaaggtggtggacgagcttgtgaaagtgatgggcagacacaagcccgagaacatcgtgatcgaaatggccagagagaaccagaccacacagaagggccagaagaacagccgcgagagaatgaagcggatcgaagagggcatcaaagagctgggcagccagatcctgaaagaacaccccgtggaaaacacccagctgcagaacgagaagctgtacctgtactacctgcagaatggacgggatatgtacgtggaccaagagctggacatcaaccggctgagcgactacgatgtggaccatatcgtgccccagagctttctgaaggacgactccatcgataacaaggtcctgaccagaagcgacaagaaccggggcaagagcgataacgtgccctccgaagaggtggtcaagaagatgaagaactactggcgacagctgctgaacgccaagctgattacccagcggaagttcgataacctgaccaaggccgagagaggcggcctgagcgaacttgataaggccggcttcattaagcggcagctggtggaaacccggcagatcaccaaacacgtggcacagattctggactcccggatgaacactaagtacgacgagaatgacaagctgatccgggaagtgaaagtcatcaccctgaagtctaagctggtgtccgatttccggaaggatttccagttctacaaagtgcgggaaatcaacaactaccatcacgcccacgacgcctacctgaatgccgttgttggaacagccctgatcaagaagtatcccaagctggaaagcgagttcgtgtacggcgactacaaggtgtacgacgtgcggaagatgatcgccaagagcgaacaagagatcggcaaggctaccgccaagtactttttctacagcaacatcatgaactttttcaagacagagatcaccctggccaacggcgagatccggaaaagacccctgatcgagacaaacggcgaaaccggggagatcgtgtgggataagggcagagattttgccacagtgcggaaagtgctgagcatgccccaagtgaatatcgtgaagaaaaccgaggtgcagacaggcggcttcagcaaagagtctatcctgcctaagcggaacagcgataagctgatcgccagaaagaaggactgggaccctaagaagtacggcggcttcgatagccctaccgtggcctattctgtgctggtggtggccaaagtggaaaagggcaagtccaaaaagctcaagagcgtgaaagagctgctggggatcaccatcatggaaagaagcagctttgagaagaacccgatcgactttctggaagccaagggctacaaagaagtcaagaaggacctcatcatcaagctccccaagtacagcctgttcgagctggaaaatggccggaagcggatgctggcctcagcaggcgaactgcagaaaggcaatgaactggccctgcctagcaaatacgtcaacttcctgtacctggccagccactatgagaagctgaagggcagccccgaggacaatgagcaaaagcagctgtttgtggaacagcacaagcactacctggacgagatcatcgagcagatcagcgagttctccaagagagtgatcctggccgacgctaacctggataaggtgctgtctgcctataacaagcaccgggacaagcctatcagagagcaggccgagaatatcatccacctgtttaccctgaccaacctgggagcccctgccgccttcaagtacttcgacaccaccatcgaccggaagaggtacaccagcaccaaagaggtgctggacgccacactgatccaccagtctatcaccggcctgtacgaaacccggatcgacctgtctcagctcggcggcgattctggtggttctggcggaagtggcggatccaccaatctgagcgacatcatcgaaaaagagacaggcaagcagctcgtgatccaagaatccatcctgatgctgcctgaagaggttgaggaagtgatcggcaacaagcctgagtccgacatcctggtgcacaccgcctacgatgagagcaccgatgagaacgtcatgctgctgacaagcgacgcccctgagtacaagccttgggctctcgtgattcaggacagcaatggggagaacaagatcaagatgctgagcggaggtagcggaggcagtggcggaagcacaaacctgtctgatatcattgaaaaagaaaccgggaagcaactggtcattcaagagtccattctcatgctcccggaagaagtcgaggaagtcattggaaacaaacccgagagcgatattctggtccacacagcctatgacgagtctacagacgaaaacgtgatgctcctgacctctgacgctcccgagtataagccctgggcacttgttatccaggactctaacggggaaaacaaaatcaaaatgttgtccggcggcagcaagcggacagccgatggatctgagttcgagagccccaagaagaaacggaaggtggagtaa

SEQ ID NO: 16 - protein, 1367 aa, Streptococcus pyogenes
MDKKYSIGLDIGTNSVGWAVITDDYKVPSKKFKVLGNTDRHSIKKNLIGALLFGSGETAEATRLKRTARRRYTRRKNRICYLQEIFSNEMAKVDDSFFHRLEESFLVEEDKKHERHPIFGNIVDEVAYHEKYPTIYHLRKKLADSTDKADLRLIYLALAHMIKFRGHFLIEGDLNPDNSDVDKLFIQLVQIYNQLFEENPINASRVDAKAILSARLSKSRRLENLIAQLPGEKRNGLFGNLIALSLGLTPNFKSNFDLAEDAKLQLSKDTYDDDLDNLLAQIGDQYADLFLAAKNLSDAILLSDILRVNSEITKAPLSASMIKRYDEHHQDLTLLKALVRQQLPEKYKEIFFDQSKNGYAGYIDGGASQEEFYKFIKPILEKMDGTEELLVKLNREDLLRKQRTFDNGSIPHQIHLGELHAILRRQEDFYPFLKDNREKIEKILTFRIPYYVGPLARGNSRFAWMTRKSEETITPWNFEEVVDKGASAQSFIERMTNFDKNLPNEKVLPKHSLLYEYFTVYNELTKVKYVTEGMRKPAFLSGEQKKAIVDLLFKTNRKVTVKQLKEDYFKKIECFDSVEISGVEDRFNASLGAYHDLLKIIKDKDFLDNEENEDILEDIVLTLTLFEDRGMIEERLKTYAHLFDDKVMKQLKRRRYTGWGRLSRKLINGIRDKQSGKTILDFLKSDGFANRNFMQLIHDDSLTFKEDIQKAQVSGQGHSLHEQIANLAGSPAIKKGILQTVKIVDELVKVMGHKPENIVIEMARENQTTQKGQKNSRERMKRIEEGIKELGSQILKEHPVENTQLQNEKLYLYYLQNGRDMYVDQELDINRLSDYDVDHIVPQSFIKDDSIDNKVLTRSDKNRGKSDNVPSEEVVKKMKNYWRQLLNAKLITQRKFDNLTKAERGGLSELDKAGFIKRQLVETRQITKHVAQILDSRMNTKYDENDKLIREVKVITLKSKLVSDFRKDFQFYKVREINNYHHAHDAYLNAVVGTALIKKYPKLESEFVYGDYKVYDVRKMIAKSEQEIGKATAKYFFYSNIMNFFKTEITLANGEIRKRPLIETNGETGEIVWDKGRDFATVRKVLSMPQVNIVKKTEVQTGGFSKESILPKRNSDKLIARKKDWDPKKYGGFDSPTVAYSVLVVAKVEKGKSKKLKSVKELLGITIMERSSFEKNPIDFLEAKGYKEVKKDLIIKLPKYSLFELENGRKRMLASAGELQKGNELALPSKYVNFLYLASHYEKLKGSPEDNEQKQLFVEQHKHYLDEIIEQISEFSKRVILADANLDKVLSAYNKHRDKPIREQAENIIHLFTLTNLGAPAAFKYFDTTIDRKRYTSTKEVLDATLIHQSITGLYETRIDLSQLGGD

SEQ ID NO: 17 - DNA, 306 bp, Artificial Sequence
  Description of Artificial Sequence: Synthetic polynucleotide
tgcctgtcatacgaaaccgagatactgacagtagaatatggccttctgccaatcgggaagattgtggagaaacggatagaatgcacagtttactctgtcgataacaatggtaacatttatactcagccagttgcccagtggcacgaccggggagagcaggaagtattcgaatactgtctggaggatggaagtctcattagggccactaaggaccacaaatttatgacagtcgatggccagatgctgcctatagacgaaatctttgagcgagagttggacctcatgcgagttgacaaccttcctaat

SEQ ID NO: 18 - protein, 102 aa, Artificial Sequence
  Description of Artificial Sequence: Synthetic polypeptide
CLSYETEILTVEYGLLPIGKIVEKRIECTVYSVDNNGNIYTQPVAQWHDRGEQEVFEYCLEDGSLIRATKDHKFMTVDGQMLPIDEIFERELDLMRVDNLPN

SEQ ID NO: 19 - DNA, 108 bp, Artificial Sequence
  Description of Artificial Sequence: Synthetic polynucleotide
atgatcaagatagctacaaggaagtatcttggcaaacaaaacgtttatgatattggagtcgaaagagatcacaactttgctctgaagaacggattcatagcttctaat

SEQ ID NO: 20 - protein, 36 aa, Artificial Sequence
  Description of Artificial Sequence: Synthetic polypeptide
MIKIATRKYLGKQNVYDIGVERDHNFALKNGFIASN

SEQ ID NO: 21 - DNA, 303 bp, Artificial Sequence
  Description of Artificial Sequence: Synthetic polynucleotide
tgcctgtcttatgataccgagatacttaccgttgaatatggcttcttgcctattggaaagattgtcgaagagagaattgaatgcacagtatatactgtagacaagaatggtttcgtttacacacagcccattgctcaatggcacaatcgcggcgaacaagaagtatttgagtactgtctcgaggatggaagcatcatacgagcaactaaagatcataaattcatgaccactgacgggcagatgttgccaatagatgagatattcgagcggggcttggatctcaaacaagtggatggattgcca

SEQ ID NO: 22 - protein, 101 aa, Artificial Sequence
  Description of Artificial Sequence: Synthetic polypeptide
CLSYDTEILTVEYGFLPIGKIVEERIECTVYTVDKNGFVYTQPIAQWHNRGEQEVFEYCLEDGSIIRATKDHKFMTTDGQMLPIDEIFERGLDLKQVDGLP

SEQ ID NO: 23 - DNA, 159 bp, Artificial Sequence
  Description of Artificial Sequence: Synthetic polynucleotide
atgaagaggactgccgatggatcagagtttgaatctcccaagaagaagaggaaagtaaagataatatctcgaaaaagtcttggtacccaaaatgtctatgatattggagtggagaaagatcacaacttccttctcaagaacggtctcgtagccagcaac

SEQ ID NO: 24 - protein, 53 aa, Artificial Sequence
  Description of Artificial Sequence: Synthetic polypeptide
MKRTADGSEFESPKKKRKVKIISRKSLGTQNVYDIGVEKDHNFLLKNGLVASN

SEQ ID NO: 25 - protein, 24 aa, Artificial Sequence
  Description of Artificial Sequence: Synthetic peptide
SGGSSGSETPGTSESATPESSGGS

SEQ ID NO: 26 - protein, 32 aa, Artificial Sequence
  Description of Artificial Sequence: Synthetic polypeptide
SGGSSGGSSGSETPGTSESATPESSGGSSGGS

SEQ ID NO: 27 - protein, 104 aa, Artificial Sequence
  Description of Artificial Sequence: Synthetic polypeptide
GGSGGSPGSPAGSPTSTEEGTSESATPESGPGTSTEPSEGSAPGSPAGSPTSTEEGTSTEPSEGSAPGTSTEPSEGSAPGTSESATPESGPGSEPATSGGSGGS

SEQ ID NO: 28 - protein, 16 aa, Artificial Sequence
  Description of Artificial Sequence: Synthetic peptide
SGSETPGTSESATPES

SEQ ID NO: 29 - protein, 24 aa, Artificial Sequence
  Description of Artificial Sequence: Synthetic peptide
SGGSSGGSSGSETPGTSESATPES

SEQ ID NO: 30 - protein, 40 aa, Artificial Sequence
  Description of Artificial Sequence: Synthetic polypeptide
SGGSSGGSSGSETPGTSESATPESSGGSSGGSSGGSSGGS

SEQ ID NO: 31 - protein, 64 aa, Artificial Sequence
  Description of Artificial Sequence: Synthetic polypeptide
SGGSSGGSSGSETPGTSESATPESSGGSSGGSSGGSSGGSSGSETPGTSESATPESSGGSSGGS

SEQ ID NO: 32 - protein, 92 aa, Artificial Sequence
  Description of Artificial Sequence: Synthetic polypeptide
PGSPAGSPTSTEEGTSESATPESGPGTSTEPSEGSAPGSPAGSPTSTEEGTSTEPSEGSAPGTSTEPSEGSAPGTSESATPESGPGSEPATS

SEQ ID NO: 33 - protein, 18 aa, Artificial Sequence
  Description of Artificial Sequence: Synthetic peptide
KRTADGSEFESPKKKRKV

SEQ ID NO: 34 - protein, 16 aa, Artificial Sequence
  Description of Artificial Sequence: Synthetic peptide
KRPAATKKAGQAKKKK

SEQ ID NO: 35 - protein, 17 aa, Artificial Sequence
  Description of Artificial Sequence: Synthetic peptide
KKTELQTTNAENKTKKL

SEQ ID NO: 36 - protein, 19 aa, Artificial Sequence
  Description of Artificial Sequence: Synthetic peptide
KRGINDRNFWRGENGRKTR

SEQ ID NO: 37 - protein, 16 aa, Artificial Sequence
  Description of Artificial Sequence: Synthetic peptide
RKSGKIAAIVVKRPRK

SEQ ID NO: 38 - protein, 7 aa, Artificial Sequence
  Description of Artificial Sequence: Synthetic peptide
PKKKRKV

SEQ ID NO: 39 - protein, 30 aa, Artificial Sequence
  Description of Artificial Sequence: Synthetic polypeptide
MDSLLMNRRKFLYQFKNVRWAKGRRETYLC

SEQ ID NO: 40 - protein, 84 aa, Unknown
  Description of Unknown: Uracil glycosylase inhibitor sequence
MTNLSDIIEKETGKQLVIQESILMLPEEVEEVIGNKPESDILVHTAYDESTDENVMLLTSDAPEYKPWALVIQDSNGENKIKML

SEQ ID NO: 41 - protein, 1368 aa, Artificial Sequence [sequence omitted]

SEQ ID NO: 42 - RNA, 80 nt, Artificial Sequence
  Description of Artificial Sequence: Synthetic oligonucleotide
guuuuagagcuagaaauagcaaguuaaaauaaggcuaguccguuaucaacuugaaaaaguggcaccgagucggugcuuuu

SEQ ID NO: 43 - DNA, 4104 bp, Streptococcus pyogenes
atggataagaaatactcaataggcttagatatcggcacaaatagcgtcggatgggcggtgatcactgatgattataaggttccgtctaaaaagttcaaggttctgggaaatacagaccgccacagtatcaaaaaaaatcttataggggctcttttatttggcagtggagagacagcggaagcgactcgtctcaaacggacagctcgtagaaggtatacacgtcggaagaatcgtatttgttatctacaggagattttttcaaatgagatggcgaaagtagatgatagtttctttcatcgacttgaagagtcttttttggtggaagaagacaagaagcatgaacgtcatcctatttttggaaatatagtagatgaagttgcttatcatgagaaatatccaactatctatcatctgcgaaaaaaattggcagattctactgataaagcggatttgcgcttaatctatttggccttagcgcatatgattaagtttcgtggtcattttttgattgagggagatttaaatcctgataatagtgatgtggacaaactatttatccagttggtacaaatctacaatcaattatttgaagaaaaccctattaacgcaagtagagtagatgctaaagcgattctttctgcacgattgagtaaatcaagacgattagaaaatctcattgctcagctccccggtgagaagagaaatggcttgtttgggaatctcattgctttgtcattgggattgacccctaattttaaatcaaattttgatttggcagaagatgctaaattacagctttcaaaagatacttacgatgatgatttagataatttattggcgcaaattggagatcaatatgctgatttgtttttggcagctaagaatttatcagatgctattttactttcagatatcctaagagtaaatagtgaaataactaaggctcccctatcagcttcaatgattaagcgctacgatgaacatcatcaagacttgactcttttaaaagctttagttcgacaacaacttccagaaaagtataaagaaatcttttttgatcaatcaaaaaacggatatgcaggttatattgatgggggagctagccaagaagaattttataaatttatcaaaccaattttagaaaaaatggatggtactgaggaattattggtgaaactaaatcgtgaagatttgctgcgcaagcaacggacctttgacaacggctctattccccatcaaattcacttgggtgagctgcatgctattttgagaagacaagaagacttttatccatttttaaaagacaatcgtgagaagattgaaaaaatcttgacttttcgaattccttattatgttggtccattggcgcgtggcaatagtcgttttgcatggatgactcggaagtctgaagaaacaattaccccatggaattttgaagaagttgtcgataaaggtgcttcagctcaatcatttattgaacgcatgacaaactttgataaaaatcttccaaatgaaaaagtactaccaaaacatagtttgctttatgagtattttacggtttataacgaattgacaaaggtcaaatatgttactgagggaatgcgaaaaccagcatttctttcaggtgaacagaagaaagccattgttgatttactcttcaaaacaaatcgaaaagtaaccgttaagcaattaaaagaagattatttcaaaaaaatagaatgttttgatagtgttgaaatttcaggagttgaagatagatttaatgcttcattaggcgcctaccatgatttgctaaaaattattaaagataaagattttttggataatgaagaaaatgaagatatcttagaggatattgttttaacattgaccttatttgaagatagggggatgattgaggaaagacttaaaacatatgctcacctctttgatgataaggtgatgaaacagcttaaacgtcgccgttatactggttggggacgtttgtctcgaaaattgattaatggtattagggataagcaatctggcaaaacaatattagattttttgaaatcagatggttttgccaatcgcaattttatgcagctgatccatgatgatagtttgacatttaaagaagatattcaaaaagcacaggtgtctggacaaggccatagtttacatgaacagattgctaacttagctggcagtcctgctattaaaaaaggtattttacagactgtaaaaattgttgatgaactggtcaaagtaatggggcataagccagaaaatatcgttattgaaatggcacgtgaaaatcagacaactcaaaagggccagaaaaattcgcgagagcgtatgaaacgaatcgaagaaggtatcaaagaattaggaagtcagattcttaaagagcatcctgttgaaaatactcaattgcaaaatgaaaagctctatctctattatctacaaaatggaagagacatgtatgtggaccaagaattagatattaatcgtttaagtgattatgatgtcgatcacattgttccacaaagtttcattaaagacgattcaatagacaataaggtactaacgcgttctgataaaaatcgtggtaaatcggataacgttccaagtgaagaagtagtcaaaaagatgaaaaactattggagacaacttctaaacgccaagttaatcactcaacgtaagtttgataatttaacgaaagctgaacgtggaggtttgagtgaacttgataaagctggttttatcaaacgccaattggttgaaactcgccaaatcactaagcatgtggcacaaattttggatagtcgcatgaatactaaatacgatgaaaatgataaacttattcgagaggttaaagtgattaccttaaaatctaaattagtttctgacttccgaaaagatttccaattctataaagtacgtgagattaacaattaccatcatgcccatgatgcgtatctaaatgccgtcgttggaactgctttgattaagaaatatccaaaacttgaatcggagtttgtctatggtgattataaagtttatgatgttcgtaaaatgattgctaagtctgagcaagaaataggcaaagcaaccgcaaaatatttcttttactctaatatcatgaacttcttcaaaacagaaattacacttgcaaatggagagattcgcaaacgccctctaatcgaaactaatggggaaactggagaaattgtctgggataaagggcgagattttgccacagtgcgcaaagtattgtccatgccccaagtcaatattgtcaagaaaacagaagtacagacaggcggattctccaaggagtcaattttaccaaaaagaaattcggacaagcttattgctcgtaaaaaagactgggatccaaaaaaatatggtggttttgatagtccaacggtagcttattcagtcctagtggttgctaaggtggaaaaagggaaatcgaagaagttaaaatccgttaaagagttactagggatcacaattatggaaagaagttcctttgaaaaaaatccgattgactttttagaagctaaaggatataaggaagttaaaaaagacttaatcattaaactacctaaatatagtctttttgagttagaaaacggtcgtaaacggatgctggctagtgccggagaattacaaaaaggaaatgagctggctctgccaagcaaatatgtgaattttttatatttagctagtcattatgaaaagttgaagggtagtccagaagataacgaacaaaaacaattgtttgtggagcagcataagcattatttagatgagattattgagcaaatcagtgaattttctaagcgtgttattttagcagatgccaatttagataaagttcttagtgcatataacaaacatagagacaaaccaatacgtgaacaagcagaaaatattattcatttatttacgttgacgaatcttggagctcccgctgcttttaaatattttgatacaacaattgatcgtaaacgatatacgtctacaaaagaagttttagatgccactcttatccatcaatccatcactggtctttatgaaacacgcattgatttgagtcagctaggaggtgactga

SEQ ID NO: 44 - DNA, 4212 bp, Streptococcus pyogenes
atggataaaaagtattctattggtttagacatcggcactaattccgttggatgggctgtcataaccgatgaatacaaagtaccttcaaagaaatttaaggtgttggggaacacagaccgtcattcgattaaaaagaatcttatcggtgccctcctattcgatagtggcgaaacggcagaggcgactcgcctgaaacgaaccgctcggagaaggtatacacgtcgcaagaaccgaatatgttacttacaagaaatttttagcaatgagatggccaaagttgacgattctttctttcaccgtttggaagagtccttccttgtcgaagaggacaagaaacatgaacggcaccccatctttggaaacatagtagatgaggtggcatatcatgaaaagtacccaacgatttatcacctcagaaaaaagctagttgactcaactgataaagcggacctgaggttaatctacttggctcttgcccatatgataaagttccgtgggcactttctcattgagggtgatctaaatccggacaactcggatgtcgacaaactgttcatccagttagtacaaacctataatcagttgtttgaagagaaccctataaatgcaagtggcgtggatgcgaaggctattcttagcgcccgcctctctaaatcccgacggctagaaaacctgatcgcacaattacccggagagaagaaaaatgggttgttcggtaaccttatagcgctctcactaggcctgacaccaaattttaagtcgaacttcgacttagctgaagatgccaaattgcagcttagtaaggacacgtacgatgacgatctcgacaatctactggcacaaattggagatcagtatgcggacttatttttggctgccaaaaaccttagcgatgcaatcctcctatctgacatactgagagttaatactgagattaccaaggcgccgttatccgcttcaatgatcaaaaggtacgatgaacatcaccaagacttgacacttctcaaggccctagtccgtcagcaactgcctgagaaatataaggaaatattctttgatcagtcgaaaaacgggtacgcaggttatattgacggcggagcgagtcaagaggaattctacaagtttatcaaacccatattagagaagatggatgggacggaagagttgcttgtaaaactcaatcgcgaagatctactgcgaaagcagcggactttcgacaacggtagcattccacatcaaatccacttaggcgaattgcatgctatacttagaaggcaggaggatttttatccgttcctcaaagacaatcgtgaaaagattgagaaaatcctaacctttcgcataccttactatgtgggacccctggcccgagggaactctcggttcgcatggatgacaagaaagtccgaagaaacgattactccatggaattttgaggaagttgtcgataaaggtgcgtcagctcaatcgttcatcgagaggatgaccaactttgacaagaatttaccgaacgaaaaagtattgcctaagcacagtttactttacgagtatttcacagtgtacaatgaactcacgaaagttaagtatgtcactgagggcatgcgtaaacccgcctttctaagcggagaacagaagaaagcaatagtagatctgttattcaagaccaaccgcaaagtgacagttaagcaattgaaagaggactactttaagaaaattgaatgcttcgattctgtcgagatctccggggtagaagatcgatttaatgcgtcacttggtacgtatcatgacctcctaaagataattaaagataaggacttcctggataacgaagagaatgaagatatcttagaagatatagtgttgactcttaccctctttgaagatcgggaaatgattgaggaaagactaaaaacatacgctcacctgttcgacgataaggttatgaaacagttaaagaggcgtcgctatacgggctggggacgattgtcgcggaaacttatcaacgggataagagacaagcaaagtggtaaaactattctcgattttctaaagagcgacggcttcgccaataggaactttatgcagctgatccatgatgactctttaaccttcaaagaggatatacaaaaggcacaggtttccggacaaggggactcattgcacgaacatattgcgaatcttgctggttcgccagccatcaaaaagggcatactccagacagtcaaagtagtggatgagctagttaaggtcatgggacgtcacaaaccggaaaacattgtaatcgagatggcacgcgaaaatcaaacgactcagaaggggcaaaaaaacagtcgagagcggatgaagagaatagaagagggtattaaagaactgggcagccagatcttaaaggagcatcctgtggaaaatacccaattgcagaacgagaaactttacctctattacctacaaaatggaagggacatgtatgttgatcaggaactggacataaaccgtttatctgattacgacgtcgatcacattgtaccccaatcctttttgaaggacgattcaatcgacaataaagtgcttacacgctcggataagaaccgagggaaaagtgacaatgttccaagcgaggaagtcgtaaagaaaatgaagaactattggcggcagctcctaaatgcgaaactgataacgcaaagaaagttcgataacttaactaaagctgagaggggtggcttgtctgaacttgacaaggccggatttattaaacgtcagctcgtggaaacccgccaaatcacaaagcatgttgcacagatactagattcccgaatgaatacgaaatacgacgagaacgataagctgattcgggaagtcaaagtaatcactttaaagtcaaaattggtgtcggacttcagaaaggattttcaattctataaagttagggagataaataactaccaccatgcgcacgacgcttatcttaatgccgtcgtagggaccgcactcattaagaaatacccgaagctagaaagtgagtttgtgtatggtgattacaaagtttatgacgtccgtaagatgatcgcgaaaagcgaacaggagataggcaaggctacagccaaatacttcttttattctaacattatgaatttctttaagacggaaatcactctggcaaacggagagatacgcaaacgacctttaattgaaaccaatggggagacaggtgaaatcgtatgggataagggccgggacttcgcgacggtgagaaaagttttgtccatgccccaagtcaacatagtaaagaaaactgaggtgcagaccggagggttttcaaaggaatcgattcttccaaaaaggaatagtgataagctcatcgctcgtaaaaaggactgggacccgaaaaagtacggtggcttcgatagccctacagttgcctattctgtcctagtagtggcaaaagttgagaagggaaaatccaagaaactgaagtcagtcaaagaattattggggataacgattatggagcgctcgtcttttgaaaagaaccccatcgacttccttgaggcgaaaggttacaaggaagtaaaaaaggatctcataattaaactaccaaagtatagtctgtttgagttagaaaatggccgaaaacggatgttggctagcgccggagagcttcaaaaggggaacgaactcgcactaccgtctaaatacgtgaatttcctgtatttagcgtcccattacgagaagttgaaaggttcacctgaagataacgaacagaagcaactttttgttgagcagcacaaacattatctcgacgaaatcatagagcaaatttcggaattcagtaagagagtcatcctagctgatgccaatctggacaaagtattaagcgcatacaacaagcacagggataaacccatacgtgagcaggcggaaaatattatccatttgtttactcttaccaacctcggcgctccagccgcattcaagtattttgacacaacgatagatcgcaaacgatacacttctaccaaggaggtgctagacgcgacactgattcaccaatccatcacgggattatatgaaactcggatagatttgtcacagcttgggggtgacggatcccccaagaagaagaggaaagtctcgagcgactacaaagaccatgacggtgattataaagatcatgacatcgattacaaggatgacgatgacaaggctgcagga

SEQ ID NO: 45 - protein, 1368 aa, Streptococcus pyogenes
MDKKYSIGLAIGTNSVGWAVITDEYKVPSKKFKVLGNTDRHSIKKNLIGALLFDSGETAEATRLKRTARRRYTRRKNRICYLQEIFSNEMAKVDDSFFHRLEESFLVEEDKKHERHPIFGNIVDEVAYHEKYPTIYHLRKKLVDSTDKADLRLIYLALAHMIKFRGHFLIEGDLNPDNSDVDKLFIQLVQTYNQLFEENPINASGVDAKAILSARLSKSRRLENLIAQLPGEKKNGLFGNLIALSLGLTPNFKSNFDLAEDAKLQLSKDTYDDDLDNLLAQIGDQYADLFLAAKNLSDAILLSDILRVNTEITKAPLSASMIKRYDEHHQDLTLLKALVRQQLPEKYKEIFFDQSKNGYAGYIDGGASQEEFYKFIKPILEKMDGTEELLVKLNREDLLRKQRTFDNGSIPHQIHLGELHAILRRQEDFYPFLKDNREKIEKILTFRIPYYVGPLARGNSRFAWMTRKSEETITPWNFEEVVDKGASAQSFIERMTNFDKNLPNEKVLPKHSLLYEYFTVYNELTKVKYVTEGMRKPAFLSGEQKKAIVDLLFKTNRKVTVKQLKEDYFKKIECFDSVEISGVEDRFNASLGTYHDLLKIIKDKDFLDNEENEDILEDIVLTLTLFEDREMIEERLKTYAHLFDDKVMKQLKRRRYTGWGRLSRKLINGIRDKQSGKTILDFLKSDGFANRNFMQLIHDDSLTFKEDIQKAQVSGQGDSLHEHIANLAGSPAIKKGILQTVKVVDELVKVMGRHKPENIVIEMARENQTTQKGQKNSRERMKRIEEGIKELGSQILKEHPVENTQLQNEKLYLYYLQNGRDMYVDQELDINRLSDYDVDHIVPQSFLKDDSIDNKVLTRSDKNRGKSDNVPSEEVVKKMKNYWRQLLNAKLITQRKFDNLTKAERGGLSELDKAGFIKRQLVETRQITKHVAQILDSRMNTKYDENDKLIREVKVITLKSKLVSDFRKDFQFYKVREINNYHHAHDAYLNAVVGTALIKKYPKLESEFVYGDYKVYDVRKMIAKSEQEIGKATAKYFFYSNIMNFFKTEITLANGEIRKRPLIETNGETGEIVWDKGRDFATVRKVLSMPQVNIVKKTEVQTGGFSKESILPKRNSDKLIARKKDWDPKKYGGFDSPTVAYSVLVVAKVEKGKSKKLKSVKELLGITIMERSSFEKNPIDFLEAKGYKEVKKDLIIKLPKYSLFELENGRKRMLASAGELQKGNELALPSKYVNFLYLASHYEKLKGSPEDNEQKQLFVEQHKHYLDEIIEQISEFSKRVILADANLDKVLSAYNKHRDKPIREQAENIIHLFTLTNLGAPAAFKYFDTTIDRKRYTSTKEVLDATLIHQSITGLYETRIDLSQLGGD

SEQ ID NO: 46 - DNA, 4107 bp, Streptococcus pyogenes
atggataagaaatactcaataggcttagatatcggcacaaatagcgtcggatgggcggtgatcactgatgaatataaggttccgtctaaaaagttcaaggttctgggaaatacagaccgccacagtatcaaaaaaaatcttataggggctcttttatttgacagtggagagacagcggaagcgactcgtctcaaacggacagctcgtagaaggtatacacgtcggaagaatcgtatttgttatctacaggagattttttcaaatgagatggcgaaagtagatgatagtttctttcatcgacttgaagagtcttttttggtggaagaagacaagaagcatgaacgtcatcctatttttggaaatatagtagatgaagttgcttatcatgagaaatatccaactatctatcatctgcgaaaaaaattggtagattctactgataaagcggatttgcgcttaatctatttggccttagcgcatatgattaagtttcgtggtcattttttgattgagggagatttaaatcctgataatagtgatgtggacaaactatttatccagttggtacaaacctacaatcaattatttgaagaaaaccctattaacgcaagtggagtagatgctaaagcgattctttctgcacgattgagtaaatcaagacgattagaaaatctcattgctcagctccccggtgagaagaaaaatggcttatttgggaatctcattgctttgtcattgggtttgacccctaattttaaatcaaattttgatttggcagaagatgctaaattacagctttcaaaagatacttacgatgatgatttagataatttattggcgcaaattggagatcaatatgctgatttgtttttggcagctaagaatttatcagatgctattttactttcagatatcctaagagtaaatactgaaataactaaggctcccctatcagcttcaatgattaaacgctacgatgaacatcatcaagacttgactcttttaaaagctttagttcgacaacaacttccagaaaagtataaagaaatcttttttgatcaatcaaaaaacggatatgcaggttatattgatgggggagctagccaagaagaattttataaatttatcaaaccaattttagaaaaaatggatggtactgaggaattattggtgaaactaaatcgtgaagatttgctgcgcaagcaacggacctttgacaacggctctattccccatcaaattcacttgggtgagctgcatgctattttgagaagacaagaagacttttatccatttttaaaagacaatcgtgagaagattgaaaaaatcttgacttttcgaattccttattatgttggtccattggcgcgtggcaatagtcgttttgcatggatgactcggaagtctgaagaaacaattaccccatggaattttgaagaagttgtcgataaaggtgcttcagctcaatcatttattgaacgcatgacaaactttgataaaaatcttccaaatgaaaaagtactaccaaaacatagtttgctttatgagtattttacggtttataacgaattgacaaaggtcaaatatgttactgaaggaatgcgaaaaccagcatttctttcaggtgaacagaagaaagccattgttgatttactcttcaaaacaaatcgaaaagtaaccgttaagcaattaaaagaagattatttcaaaaaaatagaatgttttgatagtgttgaaatttcaggagttgaagatagatttaatgcttcattaggtacctaccatgatttgctaaaaattattaaagataaagattttttggataatgaagaaaatgaagatatcttagaggatattgttttaacattgaccttatttgaagatagggagatgattgaggaaagacttaaaacatatgctcacctctttgatgataaggtgatgaaacagcttaaacgtcgccgttatactggttggggacgtttgtctcgaaaattgattaatggtattagggataagcaatctggcaaaacaatattagattttttgaaatcagatggttttgccaatcgcaattttatgcagctgatccatgatgatagtttgacatttaaagaagacattcaaaaagcacaagtgtctggacaaggcgatagtttacatgaacatattgcaaatttagctggtagccctgctattaaaaaaggtattttacagactgtaaaagttgttgatgaattggtcaaagtaatggggcggcataagccagaaaatatcgttattgaaatggcacgtgaaaatcagacaactcaaaagggccagaaaaattcgcgagagcgtatgaaacgaatcgaagaaggtatcaaagaattaggaagtcagattcttaaagagcatcctgttgaaaatactcaattgcaaaatgaaaagctctatctctattatctccaaaatggaagagacatgtatgtggaccaagaattagatattaatcgtttaagtgattatgatgtcgatcacattgttccacaaagtttccttaaagacgattcaatagacaataaggtcttaacgcgttctgataaaaatcgtggtaaatcggataacgttccaagtgaagaagtagtcaaaaagatgaaaaactattggagacaacttctaaacgccaagttaatcactcaacgtaagtttgataatttaacgaaagctgaacgtggaggtttgagtgaacttgataaagctggttttatcaaacgccaattggttgaaactcgccaaatcactaagcatgtggcacaaattttggatagtcgcatgaatactaaatacgatgaaaatgataaacttattcgagaggttaaagtgattaccttaaaatctaaattagtttctgacttccgaaaagatttccaattctataaagtacgtgagattaacaattaccatcatgcccatgatgcgtatctaaatgccgtcgttggaactgctttgattaagaaatatccaaaacttgaatcggagtttgtctatggtgattataaagtttatgatgttcgtaaaatgattgctaagtctgagcaagaaataggcaaagcaaccgcaaaatatttcttttactctaatatcatgaacttcttcaaaacagaaattacacttgcaaatggagagattcgcaaacgccctctaatcgaaactaatggggaaactggagaaattgtctgggataaagggcgagattttgccacagtgcgcaaagtattgtccatgccccaagtcaatattgtcaagaaaacagaagtacagacaggcggattctccaaggagtcaattttaccaaaaagaaattcggacaagcttattgctcgtaaaaaagactgggatccaaaaaaatatggtggttttgatagtccaacggtagcttattcagtcctagtggttgctaaggtggaaaaagggaaatcgaagaagttaaaatccgttaaagagttactagggatcacaattatggaaagaagttcctttgaaaaaaatccgattgactttttagaagctaaaggatataaggaagttaaaaaagacttaatcattaaactacctaaatatagtctttttgagttagaaaacggtcgtaaacggatgctggctagtgccggagaattacaaaaaggaaatgagctggctctgccaagcaaatatgtgaattttttatatttagctagtcattatgaaaagttgaagggtagtccagaagataacgaacaaaaacaattgtttgtggagcagcataagcattatttagatgagattattgagcaaatcagtgaattttctaagcgtgttattttagcagatgccaatttagataaagttcttagtgcatataacaaacatagagacaaaccaatacgtgaacaagcagaaaatattattcatttatttacgttgacgaatcttggagctcccgctgcttttaaatattttgatacaacaattgatcgtaaacgatatacgtctacaaaagaagttttagatgccactcttatccatcaatccatcactggtctttatgaaacacgcattgatttgagtcagctaggaggtgactga

SEQ ID NO: 47 - protein, 1368 aa, Streptococcus pyogenes [sequence omitted]

SEQ ID NO: 48 - protein, 1368 aa, Artificial Sequence
  Description of Artificial Sequence: Synthetic polypeptide
MDKKYSIGLAIGTNSVGWAVITDEYKVPSKKFKVLGNTDRHSIKKNLIGALLFDSGETAEATRLKRTARRRYTRRKNRICYLQEIFSNEMAKVDDSFFHRLEESFLVEEDKKHERHPIFGNIVDEVAYHEKYPTIYHLRKKLVDSTDKADLRLIYLALAHMIKFRGHFLIEGDLNPDNSDVDKLFIQLVQTYNQLFEENPINASGVDAKAILSARLSKSRRLENLIAQLPGEKKNGLFGNLIALSLGLTPNFKSNFDLAEDAKLQLSKDTYDDDLDNLLAQIGDQYADLFLAAKNLSDAILLSDILRVNTEITKAPLSASMIKRYDEHHQDLTLLKALVRQQLPEKYKEIFFDQSKNGYAGYIDGGASQEEFYKFIKPILEKMDGTEELLVKLNREDLLRKQRTFDNGSIPHQIHLGELHAILRRQEDFYPFLKDNREKIEKILTFRIPYYVGPLARGNSRFAWMTRKSEETITPWNFEEVVDKGASAQSFIERMTNFDKNLPNEKVLPKHSLLYEYFTVYNELTKVKYVTEGMRKPAFLSGEQKKAIVDLLFKTNRKVTVKQLKEDYFKKIECFDSVEISGVEDRFNASLGTYHDLLKIIKDKDFLDNEENEDILEDIVLTLTLFEDREMIEERLKTYAHLFDDKVMKQLKRRRYTGWGRLSRKLINGIRDKQSGKTILDFLKSDGFANRNFMQLIHDDSLTFKEDIQKAQVSGQGDSLHEHIANLAGSPAIKKGILQTVKVVDELVKVMGRHKPENIVIEMARENQTTQKGQKNSRERMKRIEEGIKELGSQILKEHPVENTQLQNEKLYLYYLQNGRDMYVDQELDINRLSDYDVDAIVPQSFLKDDSIDNKVLTRSDKNRGKSDNVPSEEVVKKMKNYWRQLLNAKLITQRKFDNLTKAERGGLSELDKAGFIKRQLVETRQITKHVAQILDSRMNTKYDENDKLIREVKVITLKSKLVSDFRKDFQFYKVREINNYHHAHDAYLNAVVGTALIKKYPKLESEFVYGDYKVYDVRKMIAKSEQEIGKATAKYFFYSNIMNFFKTEITLANGEIRKRPLIETNGETGEIVWDKGRDFATVRKVLSMPQVNIVKKTEVQTGGFSKESILPKRNSDKLIARKKDWDPKKYGGFDSPTVAYSVLVVAKVEKGKSKKLKSVKELLGITIMERSSFEKNPIDFLEAKGYKEVKKDLIIKLPKYSLFELENGRKRMLASAGELQKGNELALPSKYVNFLYLASHYEKLKGSPEDNEQKQLFVEQHKHYLDEIIEQISEFSKRVILADANLDKVLSAYNKHRDKPIREQAENIIHLFTLTNLGAPAAFKYFDTTIDRKRYTSTKEVLDATLIHQSITGLYETRIDLSQLGGD

SEQ ID NO: 49 - protein, 345 aa, Sulfolobus islandicus
MEVPLYNIFGDNYIIQVATEAENSTIYNNKVEIDDEELRNVLNLAYKIAKNNEDAAAERRGKAKKKKGEEGETTTSNIILPLSGNDKNPWTETLKCYNFPTTVALSEVFKNFSQVKECEEVSAPSFVKPEFYEFGRSPGMVERTRRVKLEVEPHYLIIAAAGWVLTRLGKAKVSEGDYVGVNVFTPTRGILYSLIQNVNGIVPGIKPETAFGLWIARKVVSSVTNPNVSVVRIYTISDAVGQNPTTINGGFSIDLTKLLEKRYLLSERLEAIARNALSISSNMRERYIVLANYIYEYLTGSKRLEDLLYFANRDLIMNLNSDDGKVRDLKLISAYVNGELIRGEG

SEQ ID NO: 50 - protein, 345 aa, Sulfolobus islandicus
MEVPLYNIFGDNYIIQVATEAENSTIYNNKVEIDDEELRNVLNLAYKIAKNNEDAAAERRGKAKKKKGEEGETTTSNIILPLSGNDKNPWTETLKCYNFPTTVALSEVFKNFSQVKECEEVSAPSFVKPEFYKFGRSPGMVERTRRVKLEVEPHYLIMAAAGWVLTRLGKAKVSEGDYVGVNVFTPTRGILYSLIQNVNGIVPGIKPETAFGLWIARKVVSSVTNPNVSVVSIYTISDAVGQNPTTINGGFSIDLTKLLEKRDLLSERLEAIARNALSISSNMRERYIVLANYIYEYLTGSKRLEDLLYFANRDLIMNLNSDDGKVRDLKLISAYVNGELIRGEG

SEQ ID NO: 51 - protein, 987 aa, Unknown
  Description of Unknown: Deltaproteobacteria CasX sequence
MEKRINKIRKKLSADNATKPVSRSGPMKTLLVRVMTDDLKKRLEKRRKKPEVMPQVISNNAANNLRMLLDDYTKMKEAILQVYWQEFKDDHVGLMCKFAQPASKKIDQNKLKPEMDEKGNLTTAGFACSQCGQPLFVYKLEQVSEKGKAYTNYFGRCNVAEHEKLILLAQLKPVKDSDEAVTYSLGKFGQRALDFYSIHVTKESTHPVKPLAQIAGNRYASGPVGKALSDACMGTIASFLSKYQDIIIEHQKVVKGNQKRLESLRELAGKENLEYPSVTLPPQPHTKEGVDFAYNEVIARVRMWVNLNLWQKLKLSRDDAKPLLRLKGFPSFPVVERRENEVDWWNTINEVKKLIDAKRDMGRVFWSGVTAEKRNTILEGYNYLPNENDHKKREGSLENPKKPAKRQFGDLLLYLEKKYAGDWGKVFDEAWERIDKKIAGLTSHIEREEARNAEDAQSKAVLTDWLRAKASFVLERLKEMDEKEFYACEIQLQKWYGDLRGNPFAVEAENRVVDISGFSIGSDGHSIQYRNLLAWKYLENGKREFYLLMNYGKKGRIRFTDGTDIKKSGKWQGLLYGGGKAKVIDLTFDPDDEQLIILPLAFGTRQGREFIWNDLLSLETGLIKLANGRVIEKTIYNKKIGRDEPALFVALTFERREVVDPSNIKPVNLIGVARGENIPAVIALTDPEGCPLPEFKDSSGGPTDILRIGEGYKEKQRAIQAAKEVEQRRAGGYSRKFASKSRNLADDMVRNSARDLFYHAVTHDAVLVFANLSRGFGRQGKRTFMTERQYTKMEDWLTAKLAYEGLTSKTYLSKTLAQYTSKTCSNCGFTITYADMDVMLVRLKKTSDGWATTLNNKELKAEYQITYYNRYKRQTVEKELSAELDRLSEESGNNDISKWTKGRRDEALFLLKKRFSHRPVQEQFVCLDCGHEVHAAEQAALNIARSWLFLNSNSTEFKSYKSGKQPFVGAWQAFYKRRLKEVWKPNA

SEQ ID NO: 52 - protein, 1210 aa, Unknown
  Description of Unknown: Uncultured Parcubacteria group bacterium
MSKRHPRISGVKGYRLHAQRLEYTGKSGAMRTIKYPLYSSPSGGRTVPREIVSAINDDYVGLYGLSNFDDLYNAEKRNEEKVYSVLDFWYDCVQYGAVFSYTAPGLLKNVAEVRGGSYELTKTLKGSHLYDELQIDKVIKFLNKKEISRANGSLDKLKKDIIDCFKAEYRERHKDQCNKLADDIKNAKKDAGASLGERQKKLFRDFFGISEQSENDKPSFTNPLNLTCCLLPFDTVNNNRNRGEVLFNKLKEYAQKLDKNEGSLEMWEYIGIGNSGTAFSNFLGEGFLGRLRENKITELKKAMMDITDAWRGQEQEEELEKRLRILAALTIKLREPKFDNHWGGYRSDINGKLSSWLQNYINQTVKIKEDLKGHKKDLKKAKEMINRFGESDTKEEAVVSSLLESIEKIVPDDSADDEKPDIPAIAIYRRFLSDGRLTLNRFVQREDVQEALIKERLEAEKKKKPKKRKKKSDAEDEKETIDFKELFPHLAKPLKLVPNFYGDSKRELYKKYKNAAIYTDALWKAVEKIYKSAFSSSLKNSFFDTDFDKDFFIKRLQKIFSVYRRFNTDKWKPIVKNSFAPYCDIVSLAENEVLYKPKQSRSRKSAAIDKNRVRLPSTENIAKAGIALARELSVAGFDWKDLLKKEEHEEYIDLIELHKTALALLLAVTETQLDISALDFVENGTVKDFMKTRDGNLVLEGRFLEMFSQSIVFSELRGLAGLMSRKEFITRSAIQTMNGKQAELLYIPHEFQSAKITTPKEMSRAFLDLAPAEFATSLEPESLSEKSLLKLKQMRYYPHYFGYELTRTGQGIDGGVAENALRLEKSPVKKREIKCKQYKTLGRGQNKIVLYVRSSYYQTQFLEWFLHRPKNVQTDVAVSGSFLIDEKKVKTRWNYDALTVALEPVSGSERVFVSQPFTIFPEKSAEEEGQRYLGIDIGEYGIAYTALEITGDSAKILDQNFISDPQLKTLREEVKGLKLDQRRGTFAMPSTKIARIRESLVHSLRNRIHHLALKHKAKIVYELEVSRFEEGKQKIKKVYATLKKADVYSEIDADKNLQTTVWGKLAVASEISASYTSQFCGACKKLWRAEMQVDETITTQELIGTVRVIKGGTLIDAIKDFMRPPIFDENDTPFPKYRDFCDKHHISKKMRGNSCLFICPFCRANADADIQASQTIALLRYVKEEKKVEDYFERFRKLKNIKVLGQMKKI

SEQ ID NO: 53 - protein, 1129 aa, Alicyclobacillus acidoterrestris
MAVKSIKVKLRLDDMPEIRAGLWKLHKEVNAGVRYYTEWLSLLRQENLYRRSPNGDGEQECDKTAEECKAELLERLRARQVENGHRGPAGSDDELLQLARQLYELLVPQAIGAKGDAQQIARKFLSPLADKDAVGGLGIAKAGNKPRWVRMREAGEPGWEEEKEKAETRKSADRTADVLRALADFGLKPLMRVYTDSEMSSVEWKPLRKGQAVRTWDRDMFQQAIERMMSWESWNQRVGQEYAKLVEQKNRFEQKNFVGQEHLVHLVNQLQQDMKEASPGLESKEQTAHYVTGRALRGSDKVFEKWGKLAPDAPFDLYDAEIKNVQRRNTRRFGSHDLFAKLAEPEYQALWREDASFLTRYAVYNSILRKLNHAKMFATFTLPDATAHPIWTRFDKLGGNLHQYTFLFNEFGERRHAIRFHKLLKVENGVAREVDDVTVPISMSEQLDNLLPRDPNEPIALYFRDYGAEQHFTGEFGGAKIQCRRDQLAHMHRRRGARDVYLNVSVRVQSQSEARGERRPPYAAVFRLVGDNHRAFVHFDKLSDYLAEHPDDGKLGSEGLLSGLRVMSVDLGLRTSASISVFRVARKDELKPNSKGRVPFFFPIKGNDNLVAVHERSQLLKLPGETESKDLRAIREERQRTLRQLRTQLAYLRLLVRCGSEDVGRRERSWAKLIEQPVDAANHMTPDWREAFENELQKLKSLHGICSDKEWMDAVYESVRRVWRHMGKQVRDWRKDVRSGERPKIRGYAKDVVGGNSIEQIEYLERQYKFLKSWSFFGKVSGQVIRAEKGSRFAITLREHIDHAKEDRLKKLADRIIMEALGYVYALDERGKGKWVAKYPPCQLILLEELSEYQFNNDRPPSENNQLMQWSHRGVFQELINQAQVHDLLVGTMYAAFSSRFDARTGAPGIRCRRVPARCTQEHNPEPFPWWLNKFVVEHTLDACPLRADDLIPTGEGEIFVSPFSAEEGDFHQIHADLNAAQNLQQRLWSDFDISQIRLRCDWGEVDGELVLIPRLTGKRTADSYSNKVFYTNTGVTYYERERGKKRRKVFAQEKLSEEEAELLVEADEAREKSVVLMRDPSGIINRGNWTRQKEFWSMVNQRIEGYLVKQIRSRVPLQDSACENTGDI

SEQ ID NO: 54 - protein, 1140 aa, Bacillus hisashii
MAPKKKRKVGIHGVPAAATRSFILKIEPNEEVKKGLWKTHEVLNHGIAYYMNILKLIRQEAIYEHHEQDPKNPKKVSKAEIQAELWDFVLKMQKCNSFTHEVDKDEVFNILRELYEELVPSSVEKKGEANQLSNKFLYPLVDPNSQSGKGTASSGRKPRWYNLKIAGDPSWEEEKKKWEEDKKKDPLAKILGKLAEYGLIPLFIPYTDSNEPIVKEIKWMEKSRNQSVRRLDKDMFIQALERFLSWESWNLKVKEEYEKVEKEYKTLEERIKEDIQALKALEQYEKERQEQLLRDTLNTNEYRLSKRGLRGWREIIQKWLKMDENEPSEKYLEVFKDYQRKHPREAGDYSVYEFLSKKENHFIWRNHPEYPYLYATFCEIDKKKKDAKQQATFTLADPINHPLWVRFEERSGSNLNKYRILTEQLHTEKLKKKLTVQLDRLIYPTESGGWEEKGKVDIVLLPSRQFYNQIFLDIEEKGKHAFTYKDESIKFPLKGTLGGARVQFDRDHLRRYPHKVESGNVGRIYFNMTVNIEPTESPVSKSLKIHRDDFPKVVNFKPKELTEWIKDSKGKKLKSGIESLEIGLRVMSIDLGQRQAAAASIFEVVDQKPDIEGKLFFPIKGTELYAVHRASFNIKLPGETLVKSREVLRKAREDNLKLMNQKLNFLRNVLHFQQFEDITEREKRVTKWISRQENSDVPLVYQDELIQIRELMYKPYKDWVAFLKQLHKRLEVEIGKEVKHWRKSLSDGRKGLYGISLKNIDEIDRTRKFLLRWSLRPTEPGEVRRLEPGQRFAIDQLNHLNALKEDRLKKMANTIIMHALGYCYDVRKKKWQAKNPACQIILFEDLSNYNPYEERSRFENSKLMKWSRREIPRQVALQGEIYGLQVGEVGAQFSSRFHAKTGSPGIRCSVVTKEKLQDNRFFKNLQREGRLTLDKIAVLKEGDLYPDKGGEKFISLSKDRKCVTTHADINAAQNLQKRFWTRTHGFYKVYCKAYQVDGQTVYIPESKDQKQKIIEEFGEGYFILKDGVYEWVNAGKLKIKKGSSKQSSSELVDSDILKDSFDLASELKGEKLMLYRDPSGNVFPSDKWMAAGVFFGKLERILISKLTNQYSISTIEDDSSKQSMKRPAATKKAGQAKKKK

SEQ ID NO: 55 - protein, 1112 aa, Bacillus sp.
MAIRSIKLKMKTNSGTDSIYLRKALWRTHQLINEGIAYYMNLLTLYRQEAIGDKTKEAYQAELINIIRNQQRNNGSSEEHGSDQEILALLRQLYELIIPSSIGESGDANQLGNKFLYPLVDPNSQSGKGTSNAGRKPRWKRLKEEGNPDWELEKKKDEERKAKDPTVKIFDNLNKYGLLPLFPLFTNIQKDIEWLPLGKRQSVRKWDKDMFIQAIERLLSWESWNRRVADEYKQLKEKTESYYKEHLTGGEEWIEKIRKFEKERNMELEKNAFAPNDGYFITSRQIRGWDRVYEKWSKLPESASPEELWKVVAEQQNKMSEGFGDPKVFSFLANRENRDIWRGHSERIYHIAAYNGLQKKLSRTKEQATFTLPDAIEHPLWIRYESPGGTNLNLFKLEEKQKKNYYVTLSKIIWPSEEKWIEKENIEIPLAPSIQFNRQIKLKQHVKGKQEISFSDYSSRISLDGVLGGSRIQFNRKYIKNHKELLGEGDIGPVFFNLVVDVAPLQETRNGRLQSPIGKALKVISSDFSKVIDYKPKELMDWMNTGSASNSFGVASLLEGMRVMSIDMGQRTSASVSIFEVVKELPKDQEQKLFYSINDTELFAIHKRSFLLNLPGEVVTKNNKQQRQERRKKRQFVRSQIRMLANVLRLETKKTPDERKKAIHKLMEIVQSYDSWTASQKEVWEKELNLLTNMAAFNDEIWKESLVELHHRIEPYVGQIVSKWRKGLSEGRKNLAGISMWNIDELEDTRRLLISWSKRSRTPGEANRIETDEPFGSSLLQHIQNVKDDRLKQMANLIIMTALGFKYDKEEKDRYKRWKETYPACQIILFENLNRYLFNLDRSRRENSRLMKWAHRSIPRTVSMQGEMFGLQVGDVRSEYSSRFHAKTGAPGIRCHALTEEDLKAGSNTLKRLIEDGFINESELAYLKKGDIIPSQGGELFVTLSKRYKKDSDNNELTVIHADINAAQNLQKRFWQQNSEVYRVPCQLARMGEDKLYIPKSQTETIKKYFGKGSFVKNNTEQEVYKWEKSEKMKIKTDTTFDLQDLDGFEDISKTIELAQEQQKKYLTMFRDPSGYFFNNETWRPQKEYWSIVNNIIKSCLKKKILSNKVEL

SEQ ID NO: 56 - protein, 1300 aa, Francisella novicida
MSIYQEFVNKYSLSKTLRFELIPQGKTLENIKARGLILDDEKRAKDYKKAKQIIDKYHQFFIEEILSSVCISEDLLQNYSDVYFKLKKSDDDNLQKDFKSAKDTIKKQISEYIKDSEKFKNLFNQNLIDAKKGQESDLILWLKQSKDNGIELFKANSDITDIDEALEIIKSFKGWTTYFKGFHENRKNVYSSNDIPTSIIYRIVDDNLPKFLENKAKYESLKDKAPEAINYEQIKKDLAEELTFDIDYKTSEVNQRVFSLDEVFEIANFNNYLNQSGITKFNTIIGGKFVNGENTKRKGINEYINLYSQQINDKTLKKYKMSVLFKQILSDTESKSFVIDKLEDDSDVVTTMQSFYEQIAAFKTVEEKSIKETLSLLFDDLKAQKLDLSKIYFKNDKSLTDLSQQVFDDYSVIGTAVLEYITQQIAPKNLDNPSKKEQELIAKKTEKAKYLSLETIKLALEEFNKHRDIDKQCRFEEILANFAAIPMIFDEIAQNKDNLAQISIKYQNQGKKDLLQASAEDDVKAIKDLLDQTNNLLHKLKIFHISQSEDKANILDKDEHFYLVFEECYFELANIVPLYNKIRNYITQKPYSDEKFKLNFENSTLANGWDKNKEPDNTAILFIKDDKYYLGVMNKKNNKIFDDKAIKENKGEGYKKIVYKLLPGANKMLPKVFFSAKSIKFYNPSEDILRIRNHSTHTKNGSPQKGYEKFEFNIEDCRKFIDFYKQSISKHPEWKDFGFRFSDTQRYNSIDEFYREVENQGYKLTFENISESYIDSVVNQGKLYLFQIYNKDFSAYSKGRPNLHTLYWKALFDERNLQDVVYKLNGEAELFYRKQSIPKKITHPAKEAIANKNKDNPKKESVFEYDLIKDKRFTEDKFFFHCPITINFKSSGANKFNDEINLLLKEKANDVHILSIDRGERHLAYYTLVDGKGNIIKQDTFNIIGNDRMKTNYHDKLAAIEKDRDSARKDWKKINNIKEMKEGYLSQVVHEIAKLVIEYNAIVVFEDLNFGFKRGRFKVEKQVYQKLEKMLIEKLNYLVFKDNEFDKTGGVLRAYQLTAPFETFKKMGKQTGIIYYVPAGFTSKICPVTGFVNQLYPKYESVSKSQEFFSKFDKICYNLDKGYFEFSFDYKNFGDKAAKGKWTIASFGSRLINFRNSDKNHNWDTREVYPTKELEKLLKDYSIEYGHGECIKAAICGESDKKFFAKLTSVLNTILQMRNSKTGTELDYLISPVADVNGNFFDSRQAPKNMPQDADANGAYHIGLKGLMLLGRIKNNQEGKKLNLVIKNEEYFEFVQNRNN

SEQ ID NO: 57 - protein, 1300 aa, Francisella novicida
MSIYQEFVNKYSLSKTLRFELIPQGKTLENIKARGLILDDEKRAKDYKKAKQIIDKYHQFFIEEILSSVCISEDLLQNYSDVYFKLKKSDDDNLQKDFKSAKDTIKKQISEYIKDSEKFKNLFNQNLIDAKKGQESDLILWLKQSKDNGIELFKANSDITDIDEALEIIKSFKGWTTYFKGFHENRKNVYSSNDIPTSIIYRIVDDNLPKFLENKAKYESLKDKAPEAINYEQIKKDLAEELTFDIDYKTSEVNQRVFSLDEVFEIANFNNYLNQSGITKFNTIIGGKFVNGENTKRKGINEYINLYSQQINDKTLKKYKMSVLFKQILSDTESKSFVIDKLEDDSDVVTTMQSFYEQIAAFKTVEEKSIKETLSLLFDDLKAQKLDLSKIYFKNDKSLTDLSQQVFDDYSVIGTAVLEYITQQIAPKNLDNPSKKEQELIAKKTEKAKYLSLETIKLALEEFNKHRDIDKQCRFEEILANFAAIPMIFDEIAQNKDNLAQISIKYQNQGKKDLLQASAEDDVKAIKDLLDQTNNLLHKLKIFHISQSEDKANILDKDEHFYLVFEECYFELANIVPLYNKIRNYITQKPYSDEKFKLNFENSTLANGWDKNKEPDNTAILFIKDDKYYLGVMNKKNNKIFDDKAIKENKGEGYKKIVYKLLPGANKMLPKVFFSAKSIKFYNPSEDILRIRNHSTHTKNGSPQKGYEKFEFNIEDCRKFIDFYKQSISKHPEWKDFGFRFSDTQRYNSIDEFYREVENQGYKLTFENISESYIDSVVNQGKLYLFQIYNKDFSAYSKGRPNLHTLYWKALFDERNLQDVVYKLNGEAELFYRKQSIPKKITHPAKEAIANKNKDNPKKESVFEYDLIKDKRFTEDKFFFHCPITINFKSSGANKFNDEINLLLKEKANDVHILSIARGERHLAYYTLVDGKGNIIKQDTFNIIGNDRMKTNYHDKLAAIEKDRDSARKDWKKINNIKEMKEGYLSQVVHEIAKLVIEYNAIVVFEDLNFGFKRGRFKVEKQVYQKLEKMLIEKLNYLVFKDNEFDKTGGVLRAYQLTAPFETFKKMGKQTGIIYYVPAGFTSKICPVTGFVNQLYPKYESVSKSQEFFSKFDKICYNLDKGYFEFSFDYKNFGDKAAKGKWTIASFGSRLINFRNSDKNHNWDTREVYPTKELEKLLKDYSIEYGHGECIKAAICGESDKKFFAKLTSVLNTILQMRNSKTGTELDYLISPVADVNGNFFDSRQAPKNMPQDADANGAYHIGLKGLMLLGRIKNNQEGKKLNLVIKNEEYFEFVQNRNN

SEQ ID NO: 58 - protein, 1300 aa, Francisella novicida
MSIYQEFVNKYSLSKTLRFELIPQGKTLENIKARGLILDDEKRAKDYKKAKQIIDKYHQFFIEEILSSVCISEDLLQNYSDVYFKLKKSDDDNLQKDFKSAKDTIKKQISEYIKDSEKFKNLFNQNLIDAKKGQESDLILWLKQSKDNGIELFKANSDITDIDEALEIIKSFKGWTTYFKGFHENRKNVYSSNDIPTSIIYRIVDDNLPKFLENKAKYESLKDKAPEAINYEQIKKDLAEELTFDIDYKTSEVNQRVFSLDEVFEIANFNNYLNQSGITKFNTIIGGKFVNGENTKRKGINEYINLYSQQINDKTLKKYKMSVLFKQILSDTESKSFVIDKLEDDSDVVTTMQSFYEQIAAFKTVEEKSIKETLSLLFDDLKAQKLDLSKIYFKNDKSLTDLSQQVFDDYSVIGTAVLEYITQQIAPKNLDNPSKKEQELIAKKTEKAKYLSLETIKLALEEFNKHRDIDKQCRFEEILANFAAIPMIFDEIAQNKDNLAQISIKYQNQGKKDLLQASAEDDVKAIKDLLDQTNNLLHKLKIFHISQSEDKANILDKDEHFYLVFEECYFELANIVPLYNKIRNYITQKPYSDEKFKLNFENSTLANGWDKNKEPDNTAILFIKDDKYYLGVMNKKNNKIFDDKAIKENKGEGYKKIVYKLLPGANKMLPKVFFSAKSIKFYNPSEDILRIRNHSTHTKNGSPQKGYEKFEFNIEDCRKFIDFYKQSISKHPEWKDFGFRFSDTQRYNSIDEFYREVENQGYKLTFENISESYIDSVVNQGKLYLFQIYNKDFSAYSKGRPNLHTLYWKALFDERNLQDVVYKLNGEAELFYRKQSIPKKITHPAKEAIANKNKDNPKKESVFEYDLIKDKRFTEDKFFFHCPITINFKSSGANKFNDEINLLLKEKANDVHILSIDRGERHLAYYTLVDGKGNIIKQDTFNIIGNDRMKTNYHDKLAAIEKDRDSARKDWKKINNIKEMKEGYLSQVVHEIAKLVIEYNAIVVFADLNFGFKRGRFKVEKQVYQKLEKMLIEKLNYLVFKDNEFDKTGGVLRAYQLTAPFETFKKMGKQTGIIYYVPAGFTSKICPVTGFVNQLYPKYESVSKSQEFFSKFDKICYNLDKGYFEFSFDYKNFGDKAAKGKWTIASFGSRLINFRNSDKNHNWDTREVYPTKELEKLLKDYSIEYGHGECIKAAICGESDKKFFAKLTSVLNTILQMRNSKTGTELDYLISPVADVNGNFFDSRQAPKNMPQDADANGAYHIGLKGLMLLGRIKNNQEGKKLNLVIKNEEYFEFVQNRNN

SEQ ID NO: 59 - protein, 1300 aa, Francisella novicida
MSIYQEFVNKYSLSKTLRFELIPQGKTLENIKARGLILDDEKRAKDYKKAKQIIDKYHQFFIEEILSSVCISEDLLQNYSDVYFKLKKSDDDNLQKDFKSAKDTIKKQISEYIKDSEKFKNLFNQNLIDAKKGQESDLILWLKQSKDNGIELFKANSDITDIDEALEIIKSFKGWTTYFKGFHENRKNVYSSNDIPTSIIYRIVDDNLPKFLENKAKYESLKDKAPEAINYEQIKKDLAEELTFDIDYKTSEVNQRVFSLDEVFEIANFNNYLNQSGITKFNTIIGGKFVNGENTKRKGINEYINLYSQQINDKTLKKYKMSVLFKQILSDTESKSFVIDKLEDDSDVVTTMQSFYEQIAAFKTVEEKSIKETLSLLFDDLKAQKLDLSKIYFKNDKSLTDLSQQVFDDYSVIGTAVLEYITQQIAPKNLDNPSKKEQELIAKKTEKAKYLSLETIKLALEEFNKHRDIDKQCRFEEILANFAAIPMIFDEIAQNKDNLAQISIKYQNQGKKDLLQASAEDDVKAIKDLLDQTNNLLHKLKIFHISQSEDKANILDKDEHFYLVFEECYFELANIVPLYNKIRNYITQKPYSDEKFKLNFENSTLANGWDKNKEPDNTAILFIKDDKYYLGVMNKKNNKIFDDKAIKENKGEGYKKIVYKLLPGANKMLPKVFFSAKSIKFYNPSEDILRIRNHSTHTKNGSPQKGYEKFEFNIEDCRKFIDFYKQSISKHPEWKDFGFRFSDTQRYNSIDEFYREVENQGYKLTFENISESYIDSVVNQGKLYLFQIYNKDFSAYSKGRPNLHTLYWKALFDERNLQDVVYKLNGEAELFYRKQSIPKKITHPAKEAIANKNKDNPKKESVFEYDLIKDKRFTEDKFFFHCPITINFKSSGANKFNDEINLLLKEKANDVHILSIDRGERHLAYYTLVDGKGNIIKQDTFNIIGNDRMKTNYHDKLAAIEKDRDSARKDWKKINNIKEMKEGYLSQVVHEIAKLVIEYNAIVVFEDLNFGFKRGRFKVEKQVYQKLEKMLIEKLNYLVFKDNEFDKTGGVLRAYQLTAPFETFKKMGKQTGIIYYVPAGFTSKICPVTGFVNQLYPKYESVSKSQEFFSKFDKICYNLDKGYFEFSFDYKNFGDKAAKGKWTIASFGSRLINFRNSDKNHNWDTREVYPTKELEKLLKDYSIEYGHGECIKAAICGESDKKFFAKLTSVLNTILQMRNSKTGTELDYLISPVADVNGNFFDSRQAPKNMPQDAAANGAYHIGLKGLMLLGRIKNNQEGKKLNLVIKNEEYFEFVQNRNN

SEQ ID NO: 60 - protein, 1300 aa, Francisella novicida
MSIYQEFVNKYSLSKTLRFELIPQGKTLENIKARGLILDDEKRAKDYKKAKQIIDKYHQFFIEEILSSVCISEDLLQNYSDVYFKLKKSDDDNLQKDFKSAKDTIKKQISEYIKDSEKFKNLFNQNLIDAKKGQESDLILWLKQSKDNGIELFKANSDITDIDEALEIIKSFKGWTTYFKGFHENRKNVYSSNDIPTSIIYRIVDDNLPKFLENKAKYESLKDKAPEAINYEQIKKDLAEELTFDIDYKTSEVNQRVFSLDEVFEIANFNNYLNQSGITKFNTIIGGKFVNGENTKRKGINEYINLYSQQINDKTLKKYKMSVLFKQILSDTESKSFVIDKLEDDSDVVTTMQSFYEQIAAFKTVEEKSIKETLSLLFDDLKAQKLDLSKIYFKNDKSLTDLSQQVFDDYSVIGTAVLEYITQQIAPKNLDNPSKKEQELIAKKTEKAKYLSLETIKLALEEFNKHRDIDKQCRFEEILANFAAIPMIFDEIAQNKDNLAQISIKYQNQGKKDLLQASAEDDVKAIKDLLDQTNNLLHKLKIFHISQSEDKANILDKDEHFYLVFEECYFELANIVPLYNKIRNYITQKPYSDEKFKLNFENSTLANGWDKNKEPDNTAILFIKDDKYYLGVMNKKNNKIFDDKAIKENKGEGYKKIVYKLLPGANKMLPKVFFSAKSIKFYNPSEDILRIRNHSTHTKNGSPQKGYEKFEFNIEDCRKFIDFYKQSISKHPEWKDFGFRFSDTQRYNSIDEFYREVENQGYKLTFENISESYIDSVVNQGKLYLFQIYNKDFSAYSKGRPNLHTLYWKALFDERNLQDVVYKLNGEAELFYRKQSIPKKITHPAKEAIANKNKDNPKKESVFEYDLIKDKRFTEDKFFFHCPITINFKSSGANKFNDEINLLLKEKANDVHILSIARGERHLAYYTLVDGKGNIIKQDTFNIIGNDRMKTNYHDKLAAIEKDRDSARKDWKKINNIKEMKEGYLSQVVHEIAKLVIEYNAIVVFADLNFGFKRGRFKVEKQVYQKLEKMLIEKLNYLVFKDNEFDKTGGVLRAYQLTAPFETFKKMGKQTGIIYYVPAGFTSKICPVTGFVNQLYPKYESVSKSQEFFSKFDKICYNLDKGYFEFSFDYKNFGDKAAKGKWTIASFGSRLINFRNSDKNHNWDTREVYPTKELEKLLKDYSIEYGHGECIKAAICGESDKKFFAKLTSVLNTILQMRNSKTGTELDYLISPVADVNGNFFDSRQAPKNMPQDADANGAYHIGLKGLMLLGRIKNNQEGKKLNLVIKNEEYFEFVQNRNN

SEQ ID NO: 61 - protein, 1300 aa, Francisella novicida
MSIYQEFVNKYSLSKTLRFELIPQGKTLENIKARGLILDDEKRAKDYKKAKQIIDKYHQFFIEEILSSVCISEDLLQNYSDVYFKLKKSDDDNLQKDFKSAKDTIKKQISEYIKDSEKFKNLFNQNLIDAKKGQESDLILWLKQSKDNGIELFKANSDITDIDEALEIIKSFKGWTTYFKGFHENRKNVYSSNDIPTSIIYRIVDDNLPKFLENKAKYESLKDKAPEAINYEQIKKDLAEELTFDIDYKTSEVNQRVFSLDEVFEIANFNNYLNQSGITKFNTIIGGKFVNGENTKRKGINEYINLYSQQINDKTLKKYKMSVLFKQILSDTESKSFVIDKLEDDSDVVTTMQSFYEQIAAFKTVEEKSIKETLSLLFDDLKAQKLDLSKIYFKNDKSLTDLSQQVFDDYSVIGTAVLEYITQQIAPKNLDNPSKKEQELIAKKTEKAKYLSLETIKLALEEFNKHRDIDKQCRFEEILANFAAIPMIFDEIAQNKDNLAQISIKYQNQGKKDLLQASAEDDVKAIKDLLDQTNNLLHKLKIFHISQSEDKANILDKDEHFYLVFEECYFELANIVPLYNKIRNYITQKPYSDEKFKLNFENSTLANGWDKNKEPDNTAILFIKDDKYYLGVMNKKNNKIFDDKAIKENKGEGYKKIVYKLLPGANKMLPKVFFSAKSIKFYNPSEDILRIRNHSTHTKNGSPQKGYEKFEFNIEDCRKFIDFYKQSISKHPEWKDFGFRFSDTQRYNSIDEFYREVENQGYKLTFENISESYIDSVVNQGKLYLFQIYNKDFSAYSKGRPNLHTLYWKALFDERNLQDVVYKLNGEAELFYRKQSIPKKITHPAKEAIANKNKDNPKKESVFEYDLIKDKRFTEDKFFFHCPITINFKSSGANKFNDEINLLLKEKANDVHILSIARGERHLAYYTLVDGKGNIIKQDTFNIIGNDRMKTNYHDKLAAIEKDRDSARKDWKKINNIKEMKEGYLSQVVHEIAKLVIEYNAIVVFEDLNFGFKRGRFKVEKQVYQKLEKMLIEKLNYLVFKDNEFDKTGGVLRAYQLTAPFETFKKMGKQTGIIYYVPAGFTSKICPVTGFVNQLYPKYESVSKSQEFFSKFDKICYNLDKGYFEFSFDYKNFGDKAAKGKWTIASFGSRLINFRNSDKNHNWDTREVYPTKELEKLLKDYSIEYGHGECIKAAICGESDKKFFAKLTSVLNTILQMRNSKTGTELDYLISPVADVNGNFFDSRQAPKNMPQDAAANGAYHIGLKGLMLLGRIKNNQEGKKLNLVIKNEEYFEFVQNRNN

SEQ ID NO: 62 - protein, 1300 aa, Francisella novicida
MSIYQEFVNKYSLSKTLRFELIPQGKTLENIKARGLILDDEKRAKDYKKAKQIIDKYHQFFIEEILSSVCISEDLLQNYSDVYFKLKKSDDDNLQKDFKSAKDTIKKQISEYIKDSEKFKNLFNQNLIDAKKGQESDLILWLKQSKDNGIELFKANSDITDIDEALEIIKSFKGWTTYFKGFHENRKNVYSSNDIPTSIIYRIVDDNLPKFLENKAKYESLKDKAPEAINYEQIKKDLAEELTFDIDYKTSEVNQRVFSLDEVFEIANFNNYLNQSGITKFNTIIGGKFVNGENTKRKGINEYINLYSQQINDKTLKKYKMSVLFKQILSDTESKSFVIDKLEDDSDVVTTMQSFYEQIAAFKTVEEKSIKETLSLLFDDLKAQKLDLSKIYFKNDKSLTDLSQQVFDDYSVIGTAVLEYITQQIAPKNLDNPSKKEQELIAKKTEKAKYLSLETIKLALEEFNKHRDIDKQCRFEEILANFAAIPMIFDEIAQNKDNLAQISIKYQNQGKKDLLQASAEDDVKAIKDLLDQTNNLLHKLKIFHISQSEDKANILDKDEHFYLVFEECYFELANIVPLYNKIRNYITQKPYSDEKFKLNFENSTLANGWDKNKEPDNTAILFIKDDKYYLGVMNKKNNKIFDDKAIKENKGEGYKKIVYKLLPGANKMLPKVFFSAKSIKFYNPSEDILRIRNHSTHTKNGSPQKGYEKFEFNIEDCRKFIDFYKQSISKHPEWKDFGFRFSDTQRYNSIDEFYREVENQGYKLTFENISESYIDSVVNQGKLYLFQIYNKDFSAYSKGRPNLHTLYWKALFDERNLQDVVYKLNGEAELFYRKQSIPKKITHPAKEAIANKNKDNPKKESVFEYDLIKDKRFTEDKFFFHCPITINFKSSGANKFNDEINLLLKEKANDVHILSIDRGERHLAYYTLVDGKGNIIKQDTFNIIGNDRMKTNYHDKLAAIEKDRDSARKDWKKINNIKEMKEGYLSQVVHEIAKLVIEYNAIVVFADLNFGFKRGRFKVEKQVYQKLEKMLIEKLNYLVFKDNEFDKTGGVLRAYQLTAPFETFKKMGKQTGIIYYVPAGFTSKICPVTGFVNQLYPKYESVSKSQEFFSKFDKICYNLDKGYFEFSFDYKNFGDKAAKGKWTIASFGSRLINFRNSDKNHNWDTREVYPTKELEKLLKDYSIEYGHGECIKAAICGESDKKFFAKLTSVLNTILQMRNSKTGTELDYLISPVADVNGNFFDSRQAPKNMPQDAAANGAYHIGLKGLMLLGRIKNNQEGKKLNLVIKNEEYFEFVQNRNN

SEQ ID NO: 63 - protein, 1300 aa, Francisella novicida
MSIYQEFVNKYSLSKTLRFELIPQGKTLENIKARGLILDDEKRAKDYKKAKQIIDKYHQFFIEEILSSVCISEDLLQNYSDVYFKLKKSDDDNLQKDFKSAKDTIKKQISEYIKDSEKFKNLFNQNLIDAKKGQESDLILWLKQSKDNGIELFKANSDITDIDEALEIIKSFKGWTTYFKGFHENRKNVYSSNDIPTSIIYRIVDDNLPKFLENKAKYESLKDKAPEAINYEQIKKDLAEELTFDIDYKTSEVNQRVFSLDEVFEIANFNNYLNQSGITKFNTIIGGKFVNGENTKRKGINEYINLYSQQINDKTLKKYKMSVLFKQILSDTESKSFVIDKLEDDSDVVTTMQSFYEQIAAFKTVEEKSIKETLSLLFDDLKAQKLDLSKIYFKNDKSLTDLSQQVFDDYSVIGTAVLEYITQQIAPKNLDNPSKKEQELIAKKTEKAKYLSLETIKLALEEFNKHRDIDKQCRFEEILANFAAIPMIFDEIAQNKDNLAQISIKYQNQGKKDLLQASAEDDVKAIKDLLDQTNNLLHKLKIFHISQSEDKANILDKDEHFYLVFEECYFELANIVPLYNKIRNYITQKPYSDEKFKLNFENSTLANGWDKNKEPDNTAILFIKDDKYYLGVMNKKNNKIFDDKAIKENKGEGYKKIVYKLLPGANKMLPKVFFSAKSIKFYNPSEDILRIRNHSTHTKNGSPQKGYEKFEFNIEDCRKFIDFYKQSISKHPEWKDFGFRFSDTQRYNSIDEFYREVENQGYKLTFENISESYIDSVVNQGKLYLFQIYNKDFSAYSKGRPNLHTLYWKALFDERNLQDVVYKLNGEAELFYRKQSIPKKITHPAKEAIANKNKDNPKKESVFEYDLIKDKRFTEDKFFFHCPITINFKSSGANKFNDEINLLLKEKANDVHILSIARGERHLAYYTLVDGKGNIIKQDTFNIIGNDRMKTNYHDKLAAIEKDRDSARKDWKKINNIKEMKEGYLSQVVHEIAKLVIEYNAIVVFADLNFGFKRGRFKVEKQVYQKLEKMLIEKLNYLVFKDNEFDKTGGVLRAYQLTAPFETFKKMGKQTGIIYYVPAGFTSKICPVTGFVNQLYPKYESVSKSQEFFSKFDKICYNLDKGYFEFSFDYKNFGDKAAKGKWTIASFGSRLINFRNSDKNHNWDTREVYPTKELEKLLKDYSIEYGHGECIKAAICGESDKKFFAKLTSVLNTILQMRNSKTGTELDYLISPVADVNGNFFDSRQAPKNMPQDAAANGAYHIGLKGLMLLGRIKNNQEGKKLNLVIKNEEYFEFVQNRNN

SEQ ID NO: 64 - protein, 1053 aa, Staphylococcus aureus
MKRNYILGLDIGITSVGYGIIDYETRDVIDAGVRLFKEANVENNEGRRSKRGARRLKRRRRHRIQRVKKLLFDYNLLTDHSELSGINPYEARVKGLSQKLSEEEFSAALLHLAKRRGVHNVNEVEEDTGNELSTKEQISRNSKALEEKYVAELQLERLKKDGEVRGSINRFKTSDYVKEAKQLLKVQKAYHQLDQSFIDTYIDLLETRRTYYEGPGEGSPFGWKDIKEWYEMLMGHCTYFPEELRSVKYAYNADLYNALNDLNNLVITRDENEKLEYYEKFQIIENVFKQKKKPTLKQIAKEILVNEEDIKGYRVTSTGKPEFTNLKVYHDIKDITARKEIIENAELLDQIAKILTIYQSSEDIQEELTNLNSELTQEEIEQISNLKGYTGTHNLSLKAINLILDELWHTNDNQIAIFNRLKLVPKKVDLSQQKEIPTTLVDDFILSPVVKRSFIQSIKVINAIIKKYGLPNDIIIELAREKNSKDAQKMINEMQKRNRQTNERIEEIIRTTGKENAKYLIEKIKLHDMQEGKCLYSLEAIPLEDLLNNPFNYEVDHIIPRSVSFDNSFNNKVLVKQEENSKKGNRTPFQYLSSSDSKISYETFKKHILNLAKGKGRISKTKKEYLLEERDINRFSVQKDFINRNLVDTRYATRGLMNLLRSYFRVNNLDVKVKSINGGFTSFLRRKWKFKKERNKGYKHHAEDALIIANADFIFKEWKKLDKAKKVMENQMFEEKQAESMPEIETEQEYKEIFITPHQIKHIKDFKDYKYSHRVDKKPNRELINDTLYSTRKDDKGNTLIVNNLNGLYDKDNDKLKKLINKSPEKLLMYHHDPQTYQKLKLIMEQYGDEKNPLYKYYEETGNYLTKYSKKDNGPVIKKIKYYGNKLNAHLDITDDYPNSRNKVVKLSLKPYRFDVYLDNGVYKFVTVKNLDVIKKENYYEVNSKCYEEAKKLKKISNQAEFIASFYNNDLIKINGELYRVIGVNNDLLNRIEVNMIDITYREYLENMNDKRPPRIIKTIASKTQSIKKYSTDILGNLYEVKSKKHPQIIKKG

SEQ ID NO: 65 - protein, 1052 aa, Staphylococcus aureus
KRNYILGLDIGITSVGYGIIDYETRDVIDAGVRLFKEANVENNEGRRSKRGARRLKRRRRHRIQRVKKLLFDYNLLTDHSELSGINPYEARVKGLSQKLSEEEFSAALLHLAKRRGVHNVNEVEEDTGNELSTKEQISRNSKALEEKYVAELQLERLKKDGEVRGSINRFKTSDYVKEAKQLLKVQKAYHQLDQSFIDTYIDLLETRRTYYEGPGEGSPFGWKDIKEWYEMLMGHCTYFPEELRSVKYAYNADLYNALNDLNNLVITRDENEKLEYYEKFQIIENVFKQKKKPTLKQIAKEILVNEEDIKGYRVTSTGKPEFTNLKVYHDIKDITARKEIIENAELLDQIAKILTIYQSSEDIQEELTNLNSELTQEEIEQISNLKGYTGTHNLSLKAINLILDELWHTNDNQIAIFNRLKLVPKKVDLSQQKEIPTTLVDDFILSPVVKRSFIQSIKVINAIIKKYGLPNDIIIELAREKNSKDAQKMINEMQKRNRQTNERIEEIIRTTGKENAKYLIEKIKLHDMQEGKCLYSLEAIPLEDLLNNPFNYEVDHIIPRSVSFDNSFNNKVLVKQEEASKKGNRTPFQYLSSSDSKISYETFKKHILNLAKGKGRISKTKKEYLLEERDINRFSVQKDFINRNLVDTRYATRGLMNLLRSYFRVNNLDVKVKSINGGFTSFLRRKWKFKKERNKGYKHHAEDALIIANADFIFKEWKKLDKAKKVMENQMFEEKQAESMPEIETEQEYKEIFITPHQIKHIKDFKDYKYSHRVDKKPNRELINDTLYSTRKDDKGNTLIVNNLNGLYDKDNDKLKKLINKSPEKLLMYHHDPQTYQKLKLIMEQYGDEKNPLYKYYEETGNYLTKYSKKDNGPVIKKIKYYGNKLNAHLDITDDYPNSRNKVVKLSLKPYRFDVYLDNGVYKFVTVKNLDVIKKENYYEVNSKCYEEAKKLKKISNQAEFIASFYNNDLIKINGELYRVIGVNNDLLNRIEVNMIDITYREYLENMNDKRPPRIIKTIASKTQSIKKYSTDILGNLYEVKSKKHPQIIKKG

SEQ ID NO: 66 - protein, 1052 aa, Staphylococcus aureus
KRNYILGLDIGITSVGYGIIDYETRDVIDAGVRLFKEANVENNEGRRSKRGARRLKRRRRHRIQRVKKLLFDYNLLTDHSELSGINPYEARVKGLSQKLSEEEFSAALLHLAKRRGVHNVNEVEEDTGNELSTKEQISRNSKALEEKYVAELQLERLKKDGEVRGSINRFKTSDYVKEAKQLLKVQKAYHQLDQSFIDTYIDLLETRRTYYEGPGEGSPFGWKDIKEWYEMLMGHCTYFPEELRSVKYAYNADLYNALNDLNNLVITRDENEKLEYYEKFQIIENVFKQKKKPTLKQIAKEILVNEEDIKGYRVTSTGKPEFTNLKVYHDIKDITARKEIIENAELLDQIAKILTIYQSSEDIQEELTNLNSELTQEEIEQISNLKGYTGTHNLSLKAINLILDELWHTNDNQIAIFNRLKLVPKKVDLSQQKEIPTTLVDDFILSPVVKRSFIQSIKVINAIIKKYGLPNDIIIELAREKNSKDAQKMINEMQKRNRQTNERIEEIIRTTGKENAKYLIEKIKLHDMQEGKCLYSLEAIPLEDLLNNPFNYEVDHIIPRSVSFDNSFNNKVLVKQEEASKKGNRTPFQYLSSSDSKISYETFKKHILNLAKGKGRISKTKKEYLLEERDINRFSVQKDFINRNLVDTRYATRGLMNLLRSYFRVNNLDVKVKSINGGFTSFLRRKWKFKKERNKGYKHHAEDALIIANADFIFKEWKKLDKAKKVMENQMFEEKQAESMPEIETEQEYKEIFITPHQIKHIKDFKDYKYSHRVDKKPNRKLINDTLYSTRKDDKGNTLIVNNLNGLYDKDNDKLKKLINKSPEKLLMYHHDPQTYQKLKLIMEQYGDEKNPLYKYYEETGNYLTKYSKKDNGPVIKKIKYYGNKLNAHLDITDDYPNSRNKVVKLSLKPYRFDVYLDNGVYKFVTVKNLDVIKKENYYEVNSKCYEEAKKLKKISNQAEFIASFYKNDLIKINGELYRVIGVNNDLLNRIEVNMIDITYREYLENMNDKRPPHIIKTIASKTQSIKKYSTDILGNLYEVKSKKHPQIIKKG

SEQ ID NO: 67 - protein, 1368 aa, Artificial Sequence
  Description of Artificial Sequence: Synthetic polypeptide
MDKKYSIGLAIGTNSVGWAVITDEYKVPSKKFKVLGNTDRHSIKKNLIGALLFDSGETAEATRLKRTARRRYTRRKNRICYLQEIFSNEMAKVDDSFFHRLEESFLVEEDKKHERHPIFGNIVDEVAYHEKYPTIYHLRKKLVDSTDKADLRLIYLALAHMIKFRGHFLIEGDLNPDNSDVDKLFIQLVQTYNQLFEENPINASGVDAKAILSARLSKSRRLENLIAQLPGEKKNGLFGNLIALSLGLTPNFKSNFDLAEDAKLQLSKDTYDDDLDNLLAQIGDQYADLFLAAKNLSDAILLSDILRVNTEITKAPLSASMIKRYDEHHQDLTLLKALVRQQLPEKYKEIFFDQSKNGYAGYIDGGASQEEFYKFIKPILEKMDGTEELLVKLNREDLLRKQRTFDNGSIPHQIHLGELHAILRRQEDFYPFLKDNREKIEKILTFRIPYYVGPLARGNSRFAWMTRKSEETITPWNFEEVVDKGASAQSFIERMTAFDKNLPNEKVLPKHSLLYEYFTVYNELTKVKYVTEGMRKPAFLSGEQKKAIVDLLFKTNRKVTVKQLKEDYFKKIECFDSVEISGVEDRFNASLGTYHDLLKIIKDKDFLDNEENEDILEDIVLTLTLFEDREMIEERLKTYAHLFDDKVMKQLKRRRYTGWGALSRKLINGIRDKQSGKTILDFLKSDGFANRNFMALIHDDSLTFKEDIQKAQVSGQGDSLHEHIANLAGSPAIKKGILQTVKVVDELVKVMGRHKPENIVIEMARENQTTQKGQKNSRERMKRIEEGIKELGSQILKEHPVENTQLQNEKLYLYYLQNGRDMYVDQELDINRLSDYDVDHIVPQSFLKDDSIDNKVLTRSDKNRGKSDNVPSEEVVKKMKNYWRQLLNAKLITQRKFDNLTKAERGGLSELDKAGFIKRQLVETRAITKHVAQILDSRMNTKYDENDKLIREVKVITLKSKLVSDFRKDFQFYKVREINNYHHAHDAYLNAVVGTALIKKYPKLESEFVYGDYKVYDVRKMIAKSEQEIGKATAKYFFYSNIMNFFKTEITLANGEIRKRPLIETNGETGEIVWDKGRDFATVRKVLSMPQVNIVKKTEVQTGGFSKESILPKRNSDKLIARKKDWDPKKYGGFDSPTVAYSVLVVAKVEKGKSKKLKSVKELLGITIMERSSFEKNPIDFLEAKGYKEVKKDLIIKLPKYSLFELENGRKRMLASAGELQKGNELALPSKYVNFLYLASHYEKLKGSPEDNEQKQLFVEQHKHYLDEIIEQISEFSKRVILADANLDKVLSAYNKHRDKPIREQAENIIHLFTLTNLGAPAAFKYFDTTIDRKRYTSTKEVLDATLIHQSITGLYETRIDLSQLGGD

SEQ ID NO: 68 - protein, 1368 aa, Streptococcus pyogenes [sequence omitted]

SEQ ID NO: 69 - protein, 1368 aa, Streptococcus pyogenes; identical to SEQ ID NO: 45

SEQ ID NO: 70 - protein, 1367 aa, Streptococcus pyogenes
MDKKYSIGLAIGTNSVGWAVITDEYKVPSKKFKVLGNTDRHSIKKNLIGALLFDSGETAEATRLKRTARRRYTRRKNRICYLQEIFSNEMAKVDDSFFHRLEESFVEEDKKHERHPIFGNIVDEVAYHEKYPTIYHLRKKLVDSTDKADLRLIYLALAHMIKFRGHFLIEGDLNPDNSDVDKLFIQLVQTYNQLFEENPINASGVDAKAILSARLSKSRRLENLIAQLPGEKKNGLFGNLIALSLGLTPNFKSNFDLAEDAKLQLSKDTYDDDLDNLLAQIGDQYADLFLAAKNLSDAILLSDILRVNTEITKAPLSASMIKRYDEHHQDLTLLKALVRQQLPEKYKEIFFDQSKNGYAGYIDGGASQEEFYKFIKPILEKMDGTEELLVKLNREDLLRKQRTFDNGSIPHQIHLGELHAILRRQEDFYPFLKDNREKIEKILTFRIPYYVGPLARGNSRFAWMTRKSEETITPWNFEEVVDKGASAQSFIERMTNFDKNLPNEKVLPKHSLLYEYFTVYNELTKVKYVTEGMRKPAFLSGEQKKAIVDLLFKTNRKVTVKQLKEDYFKKIECFDSVEISGVEDRFNASLGTYHDLLKIIKDKDFLDNEENEDILEDIVLTLTLFEDREMIEERLKTYAHLFDDKVMKQLKRRRYTGWGRLSRKLINGIRDKQSGKTILDFLKSDGFANRNFMQLIHDDSLTFKEDIQKAQVSGQGDSLHEHIANLAGSPAIKKGILQTVKVVDELVKVMGRHKPENIVIEMARENQTTQKGQKNSRERMKRIEEGIKELGSQILKEHPVENTQLQNEKLYLYYLQNGRDMYVDQELDINRLSDYDVDHIVPQSFLKDDSIDNKVLTRSDKNRGKSDNVPSEEVVKKMKNYWRQLLNAKLITQRKFDNLTKAERGGLSELDKAGFIKRQLVETRQITKHVAQILDSRMNTKYDENDKLIREVKVITLKSKLVSDFRKDFQFYKVREINNYHHAHDAYLNAVVGTALIKKYPKLESEFVYGDYKVYDVRKMIAKSEQEIGKATAKYFFYSNIMNFFKTEITLANGEIRKRPLIETNGETGEIVWDKGRDFATVRKVLSMPQVNIVKKTEVQTGGFSKESILPKRNSDKLIARKKDWDPKKYGGFESPTVAYSVLVVAKVEKGKSKKLKSVKELLGITIMERSSFEKNPIDFLEAKGYKEVKKDLIIKLPKYSLFELENGRKRMLASAGELQKGNELALPSKYVNFLYLASHYEKLKGSPEDNEQKQLFVEQHKHYLDEIIEQISEFSKRVILADANLDKVLSAYNKHRDKPIREQAENIIHLFTLTNLGAPAAFKYFDTTIDRKQYRSTKEVLDATLIHQSITGLYETRIDLSQLGGD

SEQ ID NO: 71 - protein, 1368 aa, Streptococcus pyogenes
MDKKYSIGLAIGTNSVGWAVITDEYKVPSKKFKVLGNTDRHSIKKNLIGALLFDSGETAEATRLKRTARRRYTRRKNRICYLQEIFSNEMAKVDDSFFHRLEESFLVEEDKKHERHPIFGNIVDEVAYHEKYPTIYHLRKKLVDSTDKADLRLIYLALAHMIKFRGHFLIEGDLNPDNSDVDKLFIQLVQTYNQLFEENPINASGVDAKAILSARLSKSRRLENLIAQLPGEKKNGLFGNLIALSLGLTPNFKSNFDLAEDAKLQLSKDTYDDDLDNLLAQIGDQYADLFLAAKNLSDAILLSDILRVNTEITKAPLSASMIKRYDEHHQDLTLLKALVRQQLPEKYKEIFFDQSKNGYAGYIDGGASQEEFYKFIKPILEKMDGTEELLVKLNREDLLRKQRTFDNGSIPHQIHLGELHAILRRQEDFYPFLKDNREKIEKILTFRIPYYVGPLARGNSRFAWMTRKSEETITPWNFEEVVDKGASAQSFIERMTNFDKNLPNEKVLPKHSLLYEYFTVYNELTKVKYVTEGMRKPAFLSGEQKKAIVDLLFKTNRKVTVKQLKEDYFKKIECFDSVEISGVEDRFNASLGTYHDLLKIIKDKDFLDNEENEDILEDIVLTLTLFEDREMIEERLKTYAHLFDDKVMKQLKRRRYTGWGRLSRKLINGIRDKQSGKTILDFLKSDGFANRNFMQLIHDDSLTFKEDIQKAQVSGQGDSLHEHIANLAGSPAIKKGILQTVKVVDELVKVMGRHKPENIVIEMARENQTTQKGQKNSRERMKRIEEGIKELGSQILKEHPVENTQLQNEKLYLYYLQNGRDMYVDQELDINRLSDYDVDHIVPQSFLKDDSIDNKVLTRSDKNRGKSDNVPSEEVVKKMKNYWRQLLNAKLITQRKFDNLTKAERGGLSELDKAGFIKRQLVETRQITKHVAQILDSRMNTKYDENDKLIREVKVITLKSKLVSDFRKDFQFYKVREINNYHHAHDAYLNAVVGTALIKKYPKLESEFVYGDYKVYDVRKMIAKSEQEIGKATAKYFFYSNIMNFFKTEITLANGEIRKRPLIETNGETGEIVWDKGRDFATVRKVLSMPQVNIVKKTEVQTGGFSKESILPKRNSDKLIARKKDWDPKKYGGFVSPTVAYSVLVVAKVEKGKSKKLKSVKELLGITIMERSSFEKNPIDFLEAKGYKEVKKDLIIKLPKYSLFELENGRKRMLASAGELQKGNELALPSKYVNFLYLASHYEKLKGSPEDNEQKQLFVEQHKHYLDEIIEQISEFSKRVILADANLDKVLSAYNKHRDKPIREQAENIIHLFTLTNLGAPAAFKYFDTTIDRKQYRSTKEVLDATLIHQSITGLYETRIDLSQLGGD

SEQ ID NO: 72 - protein, 1368 aa, Streptococcus pyogenes
MDKKYSIGLAIGTNSVGWAVITDEYKVPSKKFKVLGNTDRHSIKKNLIGALLFDSGETAEATRLKRTARRRYTRRKNRICYLQEIFSNEMAKVDDSFFHRLEESFLVEEDKKHERHPIFGNIVDEVAYHEKYPTIYHLRKKLVDSTDKADLRLIYLALAHMIKFRGHFLIEGDLNPDNSDVDKLFIQLVQTYNQLFEENPINASGVDAKAILSARLSKSRRLENLIAQLPGEKKNGLFGNLIALSLGLTPNFKSNFDLAEDAKLQLSKDTYDDDLDNLLAQIGDQYADLFLAAKNLSDAILLSDILRVNTEITKAPLSASMIKRYDEHHQDLTLLKALVRQQLPEKYKEIFFDQSKNGYAGYIDGGASQEEFYKFIKPILEKMDGTEELLVKLNREDLLRKQRTFDNGSIPHQIHLGELHAILRRQEDFYPFLKDNREKIEKILTFRIPYYVGPLARGNSRFAWMTRKSEETITPWNFEEVVDKGASAQSFIERMTNFDKNLPNEKVLPKHSLLYEYFTVYNELTKVKYVTEGMRKPAFLSGEQKKAIVDLLFKTNRKVTVKQLKEDYFKKIECFDSVEISGVEDRFNASLGTYHDLLKIIKDKDFLDNEENEDILEDIVLTLTLFEDREMIEERLKTYAHLFDDKVMKQLKRRRYTGWGRLSRKLINGIRDKQSGKTILDFLKSDGFANRNFMQLIHDDSLTFKEDIQKAQVSGQGDSLHEHIANLAGSPAIKKGILQTVKVVDELVKVMGRHKPENIVIEMARENQTTQKGQKNSRERMKRIEEGIKELGSQILKEHPVENTQLQNEKLYLYYLQNGRDMYVDQELDINRLSDYDVDHIVPQSFLKDDSIDNKVLTRSDKNRGKSDNVPSEEVVKKMKNYWRQLLNAKLITQRKFDNLTKAERGGLSELDKAGFIKRQLVETRQITKHVAQILDSRMNTKYDENDKLIREVKVITLKSKLVSDFRKDFQFYKVREINNYHHAHDAYLNAVVGTALIKKYPKLESEFVYGDYKVYDVRKMIAKSEQEIGKATAKYFFYSNIMNFFKTEITLANGEIRKRPLIETNGETGEIVWDKGRDFATVRKVLSMPQVNIVKKTEVQTGGFSKESILPKRNSDKLIARKKDWDPKKYGGFVSPTVAYSVLVVAKVEKGKSKKLKSVKELLGITIMERSSFEKNPIDFLEAKGYKEVKKDLIIKLPKYSLFELENGRKRMLASARELQKGNELALPSKYVNFLYLASHYEKLKGSPEDNEQKQLFVEQHKHYLDEIIEQISEFSKRVILADANLDKVLSAYNKHRDKPIREQAENIIHLFTLTNLGAPAAFKYFDTTIDRKEYRSTKEVLDATLIHQSITGLYETRIDLSQLGGD

SEQ ID NO: 73 - protein, 1359 aa, Artificial Sequence
  Description of Artificial Sequence: Synthetic polypeptide
MDKKYSIGLDIGTNSVGWAVITDDYKVPSKKFKVLGNTDRHSIKKNLIGALLFGSGETAEATRLKRTARRRYTRRKNRICYLQEIFSNEMAKVDDSFFHRLEESFLVEEDKKHERHPIFGNIVDEVAYHEKYPTIYHLRKKLADSTDKADLRLIYLALAHMIKFRGHFLIEGDLNPDNSDVDKLFIQLVQIYNQLFEENPINASRVDAKAILSARLSKSRRLENLIAQLPGEKRNGLFGNLIALSLGLTPNFKSNFDLAEDAKLQLSKDTYDDDLDNLLAQIGDQYADLFLAAKNLSDAILLSDILRVNSEITKAPLSASMIKRYDEHHQDLTLLKALVRQQLPEKYKEIFFDQSKNGYAGYIDGGASQEEFYKFIKPILEKMDGTEELLVKLNREDLLRKQRTFDNGSIPHQIHLGELHAILRRQEDFYPFLKDNREKIEKILTFRIPYYVGPLARGNSRFAWMTRKSEETITPWNFEEVVDKGASAQSFIERMTNFDKNLPNEKVLPKHSLLYEYFTVYNELTKVKYVTEGMRKPAFLSGEQKKAIVDLLFKTNRKVTVKQLKEDYFKKIECFDSVEISGVEDRFNASLGAYHDLLKIIKDKDFLDNEENEDILEDIVLTLTLFEDRGMIEERLKTYAHLFDDKVMKQLKRRRYTGWGRLSRKLINGIRDKQSGKTILDFLKSDGFANRNFMQLIHDDSLTFKEDIQKAQVSGQGHSLHEQIANLAGSPAIKKGILQTVKIVDELVKVMGHKPENIVIEMARENQTTQKGQKNSRERMKRIEEGIKELGSQILKEHPVENTQLQNEKLYLYYLQNGRDMYVDQELDINRLSDYDVDHIVPQSFIKDDSIDNKVLTRSDKNRGKSDNVPSEEVVKKMKNYWRQLLNAKLITQRKFDNLTKAERGGLSELDKAGFIKRQLVETRQITKHVAQILDSRMNTKYDENDKLIREVKVITLKSKLVSDFRKDFQFYKVREINNYHHAHDAYLNAVVGTALIKKYPKLESEFVYGDYKVYDVRKMIAKSEQEIGKATAKYFFYSNIMNFFKTEITLANGEIRKRPLIETNGETGEIVWDKGRDFATVRKVLSMPQVNIVKKTEIQTVGQNGGLFDDNPKSPLEVTPSKLVPLKKELNPKKYGGYQKPTTAYPVLLITDTKQLIPISVMNKKQFEQNPVKFLRDRGYQQVGKNDFIKLPKYTLVDIGDGIKRLWASSKEIHKGNQLVVSKKSQILLYHAHHLDSDLSNDYLQNHNQQFDVLFNEIISFSKKCKLGKEHIQKIENVYSNKKNSASIEELAESFIKLLGFTQLGATSPFNFLGVKLNQKQYKGKKDYILPCTEGTLIRQSITGLYETRVDLSKIGED

SEQ ID NO: 74 - protein, 29 aa, Artificial Sequence
  Description of Artificial Sequence: Synthetic peptide
PKKKRKVEGADKRTADGSEFESPKKKRKV

SEQ ID NO: 75 - protein, 23 aa, Artificial Sequence
  Description of Artificial Sequence: Synthetic peptide
RKSGKIAAIVVKRPRKPKKKRKV

SEQ ID NO: 76 - protein, 178 aa, Escherichia coli
MRRAFITGVFFLSEVEFSHEYWMRHALTLAKRAWDEREVPVGAVLVHNNRVIGEGWNRPIGRHDPTAHAEIMALRQGGLVMQNYRLIDATLYVTLEPCVMCAGAMIHSRIGRVVFGARDAKTGAAGSLMDVLHHPGMNHRVEITEGILADECAALLSDFFRMRRQEIKAQKKAQSSTD

SEQ ID NO: 77 - protein, 167 aa, Escherichia coli; identical to SEQ ID NO: 3

SEQ ID NO: 78 - protein, 208 aa, Petromyzon marinus
MTDAEYVRIHEKLDIYTFKKQFFNNKKSVSHRCYVLFELKRRGERRACFWGYAVNKPQSGTERGIHAEIFSIRKVEEYLRDNPGQFTINWYSSWSPCADCAEKILEWYNQELRGNGHTLKIWACKLYYEKNARNQIGLWNLRDNGVGLNVMVSEHYQCCRKIFIQSSHNQLNENRWLEKTLKRAEKRRSELSIMIQVKILHTTKSPAV

SEQ ID NO: 79 - DNA, 766 bp, Petromyzon marinus
tgacacgacacagccgtgtatatgaggaagggtagctggatggggggggggggaatacgttcagagaggacattagcgagcgtcttgttggtggccttgagtctagacacctgcagacatgaccgacgctgagtacgtgagaatccatgagaagttggacatctacacgtttaagaaacagtttttcaacaacaaaaaatccgtgtcgcatagatgctacgttctctttgaattaaaacgacggggtgaacgtagagcgtgtttttggggctatgctgtgaataaaccacagagcgggacagaacgtggaattcacgccgaaatctttagcattagaaaagtcgaagaatacctgcgcgacaaccccggacaattcacgataaattggtactcatcctggagtccttgtgcagattgcgctgaaaagatcttagaatggtataaccaggagctgcgggggaacggccacactttgaaaatctgggcttgcaaactctattacgagaaaaatgcgaggaatcaaattgggctgtggaacctcagagataacggggttgggttgaatgtaatggtaagtgaacactaccaatgttgcaggaaaatattcatccaatcgtcgcacaatcaattgaatgagaatagatggcttgagaagactttgaagcgagctgaaaaacgacggagcgagttgtccattatgattcaggtaaaaatactccacaccactaagagtcctgctgtttaagaggctatgcggatggttttc

SEQ ID NO: 80 - protein, 145 aa, Homo sapiens
MDSLLMNRRKFLYQFKNVRWAKGRRETYLCYVVKRRDSATSFSLDFGYLRNKNGCHVELLFLRYISDWDLDPGRCYRVTWFTSWSPCYDCARHVADFLRGNPNLSLRIFTARLYFCEDRKAEPEGLRRLHRAGVQIAIMTFKAPV

SEQ ID NO: 81 - DNA, 10681 bp, Homo sapiens
agagaaccatcattaattgaagtgagatttttctggcctgagacttgcagggaggcaagaagacactctggacaccactatggacaggtaaagaggcagtcttctcgtgggtgattgcactggccttcctctcagagcaaatctgagtaatgagactggtagctatccctttctctcatgtaactgtctgactgataagatcagcttgatcaatatgcatatatattttttgatctgtctccttttcttctattcagatcttatacgctgtcagcccaattctttctgtttcagacttctcttgatttccctctttttcatgtggcaaaagaagtagtgcgtacaatgtactgattcgtcctgagatttgtaccatggttgaaactaatttatggtaataatattaacatagcaaatctttagagactcaaatcatgaaaaggtaatagcagtactgtactaaaaacggtagtgctaattttcgtaataattttgtaaatattcaacagtaaaacaacttgaagacacactttcctagggaggcgttactgaaataatttagctatagtaagaaaatttgtaattttagaaatgccaagcattctaaattaattgcttgaaagtcactatgattgtgtccattataaggagacaaattcattcaagcaagttatttaatgttaaaggcccaattgttaggcagttaatggcacttttactattaactaatctttccatttgttcagacgtagcttaacttacctcttaggtgtgaatttggttaaggtcctcataatgtctttatgtgcagtttttgataggttattgtcatagaacttattctattcctacatttatgattactatggatgtatgagaataacacctaatccttatactttacctcaatttaactcctttataaagaacttacattacagaataaagattttttaaaaatatatttttttgtagagacagggtcttagcccagccgaggctggtctctaagtcctggcccaagcgatcctcctgcctgggcctcctaaagtgctggaattatagacatgagccatcacatccaatatacagaataaagatttttaatggaggatttaatgttcttcagaaaattttcttgaggtcagacaatgtcaaatgtctcctcagtttacactgagattttgaaaacaagtctgagctataggtccttgtgaagggtccattggaaatacttgttcaaagtaaaatggaaagcaaaggtaaaatcagcagttgaaattcagagaaagacagaaaaggagaaaagatgaaattcaacaggacagaagggaaatatattatcattaaggaggacagtatctgtagagctcattagtgatggcaaaatgacttggtcaggattatttttaacccgcttgtttctggtttgcacggctggggatgcagctagggttctgcctcagggagcacagctgtccagagcagctgtcagcctgcaagcctgaaacactccctcggtaaagtccttcctactcaggacagaaatgacgagaacagggagctggaaacaggcccctaaccagagaagggaagtaatggatcaacaaagttaactagcaggtcaggatcacgcaattcatttcactctgactggtaacatgtgacagaaacagtgtaggcttattgtattttcatgtagagtaggacccaaaaatccacccaaagtcctttatctatgccacatccttcttatctatacttccaggacactttttcttccttatgataaggctctctctctctccacacacacacacacacacacacacacacacacacacacacacacaaacacacaccccgccaaccaaggtgcatgtaaaaagatgtagattcctctgcctttctcatctacacagcccaggagggtaagttaatataagagggatttattggtaagagatgatgcttaatctgtttaacactgggcctcaaagagagaatttcttttcttctgtacttattaagcacctattatgtgttgagcttatatatacaaagggttattatatgctaatatagtaatagtaatggtggttggtactatggtaattaccataaaaattattatccttttaaaataaagctaattattattggatcttttttagtattcattttatgttttttatgtttttgattttttaaaagacaatctcaccctgttacccaggctggagtgcagtggtgcaatcatagctttctgcagtcttgaactcctgggctcaagcaatcctcctgccttggcctcccaaagtgttgggatacagtcatgagccactgcatctggcctaggatccatttagattaaaatatgcattttaaattttaaaataatatggctaatttttaccttatgtaatgtgtatactggcaataaatctagtttgctgcctaaagtttaaagtgctttccagtaagcttcatgtacgtgaggggagacatttaaagtgaaacagacagccaggtgtggtggctcacgcctgtaatcccagcactctgggaggctgaggtgggtggatcgcttgagccctggagttcaagaccagcctgagcaacatggcaaaacgctgtttctataacaaaaattagccgggcatggtggcatgtgcctgtggtcccagctactagggggctgaggcaggagaatcgttggagcccaggaggtcaaggctgcactgagcagtgcttgcgccactgcactccagcctgggtgacaggaccagaccttgcctcaaaaaaataagaagaaaaattaaaaataaatggaaacaactacaaagagctgttgtcctagatgagctacttagttaggctgatattttggtatttaacttttaaagtcagggtctgtcacctgcactacattattaaaatatcaattctcaatgtatatccacacaaagactggtacgtgaatgttcatagtacctttattcacaaaaccccaaagtagagactatccaaatatccatcaacaagtgaacaaataaacaaaatgtgctatatccatgcaatggaataccaccctgcagtacaaagaagctacttggggatgaatcccaaagtcatgacgctaaatgaaagagtcagacatgaaggaggagataatgtatgccatacgaaattctagaaaatgaaagtaacttatagttacagaaagcaaatcagggcaggcatagaggctcacacctgtaatcccagcactttgagaggccacgtgggaagattgctagaactcaggagttcaagaccagcctgggcaacacagtgaaactccattctccacaaaaatgggaaaaaaagaaagcaaatcagtggttgtcctgtggggaggggaaggactgcaaagagggaagaagctctggtggggtgagggtggtgattcaggttctgtatcctgactgtggtagcagtttggggtgtttacatccaaaaatattcgtagaattatgcatcttaaatgggtggagtttactgtatgtaaattatacctcaatgtaagaaaaaataatgtgtaagaaaactttcaattctcttgccagcaaacgttattcaaattcctgagccctttacttcgcaaattctctgcacttctgccccgtaccattaggtgacagcactagctccacaaattggataaatgcatttctggaaaagactagggacaaaatccaggcatcacttgtgctttcatatcaaccatgctgtacagcttgtgttgctgtctgcagctgcaatggggactcttgatttctttaaggaaacttgggttaccagagtatttccacaaatgctattcaaattagtgcttatgatatgcaagacactgtgctaggagccagaaaacaaagaggaggagaaatcagtcattatgtgggaacaacatagcaagatatttagatcattttgactagttaaaaaagcagcagagtacaaaatcacacatgcaatcagtataatccaaatcatgtaaatatgtgcctgtagaaagactagaggaataaacacaagaatcttaacagtcattgtcattagacactaagtctaattattattattagacactatgatatttgagatttaaaaaatctttaatattttaaaatttagagctcttctatttttccatagtattcaagtttgacaatgatcaagtattactctttctttttttttttttttttttttttttgagatggagttttggtcttgttgcccatgctggagtggaatggcatgaccatagctcactgcaacctccacctcctgggttcaagcaaagctgtcgcctcagcctcccgggtagatgggattacaggcgcccaccaccacactcggctaatgtttgtatttttagtagagatggggtttcaccatgttggccaggctggtctcaaactcctgacctcagaggatccacctgcctcagcctcccaaagtgctgggattacagatgtaggccactgcgcccggccaagtattgctcttatacattaaaaaacaggtgtgagccactgcgcccagccaggtattgctcttatacattaaaaaataggccggtgcagtggctcacgcctgtaatcccagcactttgggaagccaaggcgggcagaacacccgaggtcaggagtccaaggccagcctggccaagatggtgaaaccccgtctctattaaaaatacaaacattacctgggcatgatggtgggcgcctgtaatcccagctactcaggaggctgaggcaggaggatccgcggagcctggcagatctgcctgagcctgggaggttgaggctacagtaagccaagatcatgccagtatacttcagcctgggcgacaaagtgagaccgtaacaaaaaaaaaaaaatttaaaaaaagaaatttagatcaagatccaactgtaaaaagtggcctaaacaccacattaaagagtttggagtttattctgcaggcagaagagaaccatcagggggtcttcagcatgggaatggcatggtgcacctggtttttgtgagatcatggtggtgacagtgtggggaatgttattttggagggactggaggcagacagaccggttaaaaggccagcacaacagataaggaggaagaagatgagggcttggaccgaagcagagaagagcaaacagggaaggtacaaattcaagaaatattggggggtttgaatcaacacatttagatgattaattaaatatgaggactgaggaataagaaatgagtcaaggatggttccaggctgctaggctgcttacctgaggtggcaaagtcgggaggagtggcagtttaggacagggggcagttgaggaatattgttttgatcattttgagtttgaggtacaagttggacacttaggtaaagactggaggggaaatctgaatatacaattatgggactgaggaacaagtttattttattttttgtttcgttttcttgttgaagaacaaatttaattgtaatcccaagtcatcagcatctagaagacagtggcaggaggtgactgtcttgtgggtaagggtttggggtccttgatgagtatctctcaattggccttaaatataagcaggaaaaggagtttatgatggattccaggctcagcagggctcaggagggctcaggcagccagcagaggaagtcagagcatcttctttggtttagcccaagtaatgacttccttaaaaagctgaaggaaaatccagagtgaccagattataaactgtactcttgcattttctctccctcctctcacccacagcctcttgatgaaccggaggaagtttctttaccaattcaaaaatgtccgctgggctaagggtcggcgtgagacctacctgtgctacgtagtgaagaggcgtgacagtgctacatccttttcactggactttggttatcttcgcaataaggtatcaattaaagtcggctttgcaagcagtttaatggtcaactgtgagtgcttttagagccacctgctgatggtattacttccatccttttttggcatttgtgtctctatcacattcctcaaatccttttttttatttctttttccatgtccatgcacccatattagacatggcccaaaatatgtgatttaattcctccccagtaatgctgggcaccctaataccactccttccttcagtgccaagaacaactgctcccaaactgtttaccagctttcctcagcatctgaattgcctttgagattaattaagctaaaagcatttttatatgggagaatattatcagcttgtccaagcaaaaattttaaatgtgaaaaacaaattgtgtcttaagcatttttgaaaattaaggaagaagaatttgggaaaaaattaacggtggctcaattctgtcttccaaatgatttcttttccctcctactcacatgggtcgtaggccagtgaatacattcaacatggtgatccccagaaaactcagagaagcctcggctgatgattaattaaattgatctttcggctacccgagagaattacatttccaagagacttcttcaccaaaatccagatgggtttacataaacttctgcccacgggtatctcctctctcctaacacgctgtgacgtctgggcttggtggaatctcagggaagcatccgtggggtggaaggtcatcgtctggctcgttgtttgatggttatattaccatgcaattttctttgcctacatttgtattgaatacatcccaatctccttcctattcggtgacatgacacattctatttcagaaggctttgattttatcaagcactttcatttacttctcatggcagtgcctattacttctcttacaatacccatctgtctgctttaccaaaatctatttccccttttcagatcctcccaaatggtcctcataaactgtcctgcctccacctagtggtccaggtatatttccacaatgttacatcaacaggcacttctagccattttccttctcaaaaggtgcaaaaagcaacttcataaacacaaattaaatcttcggtgaggtagtgtgatgctgcttcctcccaactcagcgcacttcgtcttcctcattccacaaaaacccatagccttccttcactctgcaggactagtgctgccaagggttcagctctacctactggtgtgctcttttgagcaagttgcttagcctctctgtaacacaaggacaatagctgcaagcatccccaaagatcattgcaggagacaatgactaaggctaccagagccgcaataaaagtcagtgaattttagcgtggtcctctctgtctctccagaacggctgccacgtggaattgctcttcctccgctacatctcggactgggacctagaccctggccgctgctaccgcgtcacctggttcacctcctggagcccctgctacgactgtgcccgacatgtggccgactttctgcgagggaaccccaacctcagtctgaggatcttcaccgcgcgcctctacttctgtgaggaccgcaaggctgagcccgaggggctgcggcggctgcaccgcgccggggtgcaaatagccatcatgaccttcaaaggtgcgaaagggccttccgcgcaggcgcagtgcagcagcccgcattcgggattgcgatgcggaatgaatgagttagtggggaagctcgaggggaagaagtgggcggggattctggttcacctctggagccgaaattaaagattagaagcagagaaaagagtgaatggctcagagacaaggccccgaggaaatgagaaaatggggccagggttgcttctttcccctcgatttggaacctgaactgtcttctacccccatatccccgcctttttttcctttttttttttttgaagattatttttactgctggaatacttttgtagaaaaccacgaaagaactttcaaagcctgggaagggctgcatgaaaattcagttcgtctctccagacagcttcggcgcatccttttggtaaggggcttcctcgctttttaaattttctttctttctctacagtcttttttggagtttcgtatatttcttatattttcttattgttcaatcactctcagttttcatctgatgaaaactttatttctcctccacatcagctttttcttctgctgtttcaccattcagagccctctgctaaggttccttttccctcccttttctttcttttgttgtttcacatctttaaatttctgtctctccccagggttgcgtttccttcctggtcagaattcttttctcctttttttttttttttttttttttttttaaacaaacaaacaaaaaacccaaaaaaactctttcccaatttactttcttccaacatgttacaaagccatccactcagtttagaagactctccggccccaccgacccccaacctcgttttgaagccattcactcaatttgcttctctctttctctacagcccctgtatgaggttgatgacttacgagacgcatttcgtactttgggactttgatagcaacttccaggaatgtcacacacgatgaaatatctctgctgaagacagtggataaaaaacagtccttcaagtcttctctgtttttattcttcaactctcactttcttagagtttacagaaaaaatatttatatacgactctttaaaaagatctatgtcttgaaaatagagaaggaacacaggtctggccagggacgtgctgcaattggtgcagttttgaatgcaacattgtcccctactgggaataacagaactgcaggacctgggagcatcctaaagtgtcaacgtttttctatgacttttaggtaggatgagagcagaaggtagatcctaaaaagcatggtgagaggatcaaatgtttttatatcaacatcctttattatttgattcatttgagttaacagtggtgttagtgatagatttttctattcttttcccttgacgtttactttcaagtaacacaaactcttccatcaggccatgatctataggacctcctaatgagagtatctgggtgattgtgaccccaaaccatctctccaaagcattaatatccaatcatgcgctgtatgttttaatcagcagaagcatgtttttatgtttgtacaaaagaagattgttatgggtggggatggaggtatagaccatgcatggtcaccttcaagctactttaataaaggatcttaaaatgggcaggaggactgtgaacaagacaccctaataatgggttgatgtctgaagtagcaaatcttctggaaacgcaaactcttttaaggaagtccctaatttagaaacacccacaaacttcacatatcataattagcaaacaattggaaggaagttgcttgaatgttggggagaggaaaatctattggctctcgtgggtctcttcatctcagaaatgccaatcaggtcaaggtttgctacattttgtatgtgtgtgatgcttctcccaaaggtatattaactatataagagagttgtgacaaaacagaatgataaagctgcgaaccgtggcacacgctcatagttctagctgcttgggaggttgaggagggaggatggcttgaacacaggtgttcaaggccagcctgggcaacataacaagatcctgtctctcaaaaaaaaaaaaaaaaaaaagaaagagagagggccgggcgtggtggctcacgcctgtaatcccagcactttgggaggccgagccgggcggatcacctgtggtcaggagtttgagaccagcctggccaacatggcaaaaccccgtctgtactcaaaatgcaaaaattagccaggcgtggtagcaggcacctgtaatcccagctacttgggaggctgaggcaggagaatcgcttgaacccaggaggtggaggttgcagtaagctgagatcgtgccgttgcactccagcctgggcgacaagagcaagactctgtctcagaaaaaaaaaaaaaaaagagagagagagagaaagagaacaatatttgggagagaaggatggggaagcattgcaaggaaattgtgctttatccaacaaaatgtaaggagccaataagggatccctatttgtctcttttggtgtctatttgtccctaacaactgtctttgacagtgagaaaaatattcagaataaccatatccctgtgccgttattacctagcaacccttgcaatgaagatgagcagatccacaggaaaacttgaatgcacaactgtcttattttaatcttattgtacataagtttgtaaaagagttaaaaattgttacttcatgtattcatttatattttatattattttgcgtctaatgattttttattaacatgatttccttttctgatatattgaaatggagtctcaaagcttcataaatttataactttagaaatgattctaataacaacgtatgtaattgtaacattgcagtaatggtgctacgaagccatttctcttgatttttagtaaacttttatgacagcaaatttgcttctggctcactttcaatcagttaaataaatgataaataattttggaagctgtgaagataaaataccaaataaaataatataaaagtgatttatatgaagttaaaataaaaaatcagtatgatggaataaacttg

SEQ ID NO: 82 - protein, 198 aa, Homo sapiens [sequence omitted]

SEQ ID NO: 83 - protein, 198 aa, Mus sp.
MDSLLMKQKKFLYHFKNVRWAKGRHETYLCYVVKRRDSATSCSLDFGHLRNKSGCHVELLFLRYISDWDLDPGRCYRVTWFTSWSPCYDCARHVAEFLRWNPNLSLRIFTARLYFCEDRKAEPEGLRRLHRAGVQIGIMTFKDYFYCWNTFVENRERTFKAWEGLHENSVRLTRQLRRILLPLYEVDDLRDAFRMLGF

SEQ ID NO: 84 - protein, 198 aa, Canis sp.
MDSLLMKQRKFLYHFKNVRWAKGRHETYLCYVVKRRDSATSFSLDFGHLRNKSGCHVELLFLRYISDWDLDPGRCYRVTWFTSWSPCYDCARHVADFLRGYPNLSLRIFAARLYFCEDRKAEPEGLRRLHRAGVQIAIMTFKDYFYCWNTFVENREKTFKAWEGLHENSVRLSRQLRRILLPLYEVDDLRDAFRTLGL

SEQ ID NO: 85 - protein, 199 aa, Bos sp.
MDSLLKKQRQFLYQFKNVRWAKGRHETYLCYVVKRRDSPTSFSLDFGHLRNKAGCHVELLFLRYISDWDLDPGRCYRVTWFTSWSPCYDCARHVADFLRGYPNLSLRIFTARLYFCDKERKAEPEGLRRLHRAGVQIAIMTFKDYFYCWNTFVENHERTFKAWEGLHENSVRLSRQLRRILLPLYEVDDLRDAFRTLGL

SEQ ID NO: 86 - protein, 239 aa, Rattus sp.
MAVGSKPKAALVGPHWERERIWCFLCSTGLGTQQTGQTSRWLRPAATQDPVSPPRSLLMKQRKFLYHFKNVRWAKGRHETYLCYVVKRRDSATSFSLDFGYLRNKSGCHVELLFLRYISDWDLDPGRCYRVTWFTSWSPCYDCARHVADFLRGNPNLSLRIFTARLTGWGALPAGLMSPARPSDYFYCWNTFVENHERTFKAWEGLHENSVRLSRRLRRILLPLYEVDDLRDAFRTLGL

SEQ ID NO: 87 - protein, 429 aa, Mus sp.
MGPFCLGCSHRKCYSPIRNLISQETFKFHFKNLGYAKGRKDTFLCYEVTRKDCDSPVSLHHGVFKNKDNIHAEICFLYWFHDKVLKVLSPREEFKITWYMSWSPCFECAEQIVRFLATHHNLSLDIFSSRLYNVQDPETQQNLCRLVQEGAQVAAMDLYEFKKCWKKFVDNGGRRFRPWKRLLTNFRYQDSKLQEILRPCYIPVPSSSSSTLSNICLTKGLPETRFCVEGRRMDPLSEEEFYSQFYNQRVKHLCYYHRMKPYLCYQLEQFNGQAPLKGCLLSEKGKQHAEILFLDKIRSMELSQVTITCYLTWSPCPNCAWQLAAFKRDRPDLILHIYTSRLYFHWKRPFQKGLCSLWQSGILVDVMDLPQFTDCWTNFVNPKRPFWPWKGLEIISRRTQRRLRRIKESWGLQDLVNDFGNLQLGPPMS

SEQ ID NO: 88 - protein, 430 aa, Rattus sp.
MGPFCLGCSHRKCYSPIRNLISQETFKFHFKNRLRYAIDRKDTFLCYEVTRKDCDSPVSLHHGVFKNKDNIHAEICFLYWFHDKVLKVLSPREEFKITWYMSWSPCFECAEQVLRFLATHHNLSLDIFSSRLYNIRDPENQQNLCRLVQEGAQVAAMDLYEFKKCWKKFVDNGGRRFRPWKKLLTNFRYQDSKLQEILRPCYIPVPSSSSSTLSNICLTKGLPETRFCVERRRVHLLSEEEFYSQFYNQRVKHLCYYHGVKPYLCYQLEQFNGQAPLKGCLLSEKGKQHAEILFLDKIRSMELSQVIITCYLTWSPCPNCAWQLAAFKRDRPDLILHIYTSRLYFHWKRPFQKGLCSLWQSGILVDVMDLPQFTDCWTNFVNPKRPFWPWKGLEIISRRTQRRLHRIKESWGLQDLVNDFGNLQLGPPMS

SEQ ID NO: 89 - protein, 370 aa, Macaca mulatta
MVEPMDPRTFVSNFNNRPILSGLNTVWLCCEVKTKDPSGPPLDAKIFQGKVYSKAKYHPEMRFLRWFHKWRQLHHDQEYKVTWYVSWSPCTRCANSVATFLAKDPKVTLTIFVARLYYFWKPDYQQALRILCQKRGGPHATMKIMNYNEFQDCWNKFVDGRGKPFKPRNNLPKHYTLLQATLGELLRHLMDPGTFTSNFNNKPWVSGQHETYLCYKVERLHNDTWVPLNQHRGFLRNQAPNIHGFPKGRHAELCFLDLIPFWKLDGQQYRVTCFTSWSPCFSCAQEMAKFISNNEHVSLCIFAARIYDDQGRYQEGLRALHRDGAKIAMMNYSEFEYCWDTFVDRQGRPFQPWDGLDEHSQALSGRLRAI

SEQ ID NO: 90 - protein, 384 aa, Pan sp.
MKPHFRNPVERMYQDTFSDNFYNRPILSHRNTVWLCYEVKTKGPSRPPLDAKIFRGQVYSKLKYHPEMRFFHWFSKWRKLHRDQEYEVTWYISWSPCTKCTRDVATFLAEDPKVTLTIFVARLYYFWDPDYQEALRSLCQKRDGPRATMKIMNYDEFQHCWSKFVYSQRELFEPWNNLPKYYILLHIMLGEILRHSMDPPTFTSNFNNELWVRGRHETYLCYEVERLHNDTWVLLNQRRGFLCNQAPHKHGFLEGRHAELCFLDVIPFWKLDLHQDYRVTCFTSWSPCFSCAQEMAKFISNNKHVSLCIFAARIYDDQGRCQEGLRTLAKAGAKISIMTYSEFKHCWDTFVDHQGCPFQPWDGLEEHSQALSGRLRAILQNQGN

SEQ ID NO: 91 - protein, 377 aa, Chlorocebus sabaeus
MNPQIRNMVEQMEPDIFVYYFNNRPILSGRNTVWLCYEVKTKDPSGPPLDANIFQGKLYPEAKDHPEMKFLHWFRKWRQLHRDQEYEVTWYVSWSPCTRCANSVATFLAEDPKVTLTIFVARLYYFWKPDYQQALRILCQERGGPHATMKIMNYNEFQHCWNEFVDGQGKPFKPRKNLPKHYTLLHATLGELLRHVMDPGTFTSNFNNKPWVSGQRETYLCYKVERSHNDTWVLLNQHRGFLRNQAPDRHGFPKGRHAELCFLDLIPFWKLDDQQYRVTCFTSWSPCFSCAQKMAKFISNNKHVSLCIFAARIYDDQGRCQEGLRTLHRDGAKIAVMNYSEFEYCWDTFVDRQGRPFQPWDGLDEHSQALSGRLRAI

SEQ ID NO: 92 - protein, 384 aa, Homo sapiens
MKPHFRNTVERMYRDTFSYNFYNRPILSRRNTVWLCYEVKTKGPSRPPLDAKIFRGQVYSELKYHPEMRFFHWFSKWRKLHRDQEYEVTWYISWSPCTKCTRDMATFLAEDPKVTLTIFVARLYYFWDPDYQEALRSLCQKRDGPRATMKIMNYDEFQHCWSKFVYSQRELFEPWNNLPKYYILLHIMLGEILRHSMDPPTFTFNFNNEPWVRGRHETYLCYEVERMHNDTWVLLNQRRGFLCNQAPHKHGFLEGRHAELCFLDVIPFWKLDLDQDYRVTCFTSWSPCFSCAQEMAKFISKNKHVSLCIFTARIYDDQGRCQEGLRTLAEAGAKISIMTYSEFKHCWDTFVDHQGCPFQPWDGLDEHSQDLSGRLRAILQNQEN

SEQ ID NO: 93 - protein, 373 aa, Homo sapiens
MKPHFRNTVERMYRDTFSYNFYNRPILSRRNTVWLCYEVKTKGPSRPRLDAKIFRGQVYSQPEHHAEMCFLSWFCGNQLPAYKCFQITWFVSWTPCPDCVAKLAEFLAEHPNVTLTISAARLYYYWERDYRRALCRLSQAGARVKIMDDEEFAYCWENFVYSEGQPFMPWYKFDDNYAFLHRTLKEILRNPMEAMYPHIFYFHFKNLRKAYGRNESWLCFTMEVVKHHSPVSWKRGVFRNQVDPETHCHAERCFLSWFCDDILSPNTNYEVTWYTSWSPCPECAGEVAEFLARHSNVNLTIFTARLYYFWDTDYQEGLRSLSQEGASVEIMGYKDFKYCWENFVYNDDEPFKPWKGLKYNFLFLDSKLQEILE

SEQ ID NO: 94 - protein, 382 aa, Homo sapiens
MNPQIRNPMERMYRDTFYDNFENEPILYGRSYTWLCYEVKIKRGRSNLLWDTGVFRGQVYFKPQYHAEMCFLSWFCGNQLPAYKCFQITWFVSWTPCPDCVAKLAEFLSEHPNVTLTISAARLYYYWERDYRRALCRLSQAGARVTIMDYEEFAYCWENFVYNEGQQFMPWYKFDENYAFLHRTLKEILRYLMDPDTFTFNFNNDPLVLRRRQTYLCYEVERLDNGTWVLMDQHMGFLCNEAKNLLCGFYGRHAELRFLDLVPSLQLDPAQIYRVTWFISWSPCFSWGCAGEVRAFLQENTHVRLRIFAARIYDYDPLYKEALQMLRDAGAQVSIMTYDEFEYCWDTFVYRQGCPFQPWDGLEEHSQALSGRLRAILQNQGN

SEQ ID NO: 95 - protein, 395 aa, Rattus sp.
MQPQGLGPNAGMGPVCLGCSHRRPYSPIRNPLKKLYQQTFYFHFKNVRYAWGRKNNFLCYEVNGMDCALPVPLRQGVFRKQGHIHAELCFIYWFHDKVLRVLSPMEEFKVTWYMSWSPCSKCAEQVARFLAAHRNLSLAIFSSRLYYYLRNPNYQQKLCRLIQEGVHVAAMDLPEFKKCWNKFVDNDGQPFRPWMRLRINFSFYDCKLQEIFSRMNLLREDVFYLQFNNSHRVKPVQNRYYRRKSYLCYQLERANGQEPLKGYLLYKKGEQHVEILFLEKMRSMELSQVRITCYLTWSPCPNCARQLAAFKKDHPDLILRIYTSRLYFWRKKFQKGLCTLWRSGIHVDVMDLPQFADCWTNFVNPQRPFRPWNELEKNSWRIQRRLRRIKESWGL

SEQ ID NO: 96 - protein, 226 aa, Bos sp.
DGWEVAFRSGTVLKAGVLGVSMTEGWAGSGHPGQGACVWTPGTRNTMNLLREVLFKQQFGNQPRVPAPYYRRKTYLCYQLKQRNDLTLDRGCFRNKKQRHAERFIDKINSLDLNPSQSYKIICYITWSPCPNCANELVNFITRNNHLKLEIFASRLYFHWIKSFKMGLQDLQNAGISVAVMTHTEFEDCWEQFVDNQSRPFQPWDKLEQYSASIRRRLQRILTAPI

SEQ ID NO: 97 - protein, 490 aa, Pan sp.
MNPQIRNPMEWMYQRTFYYNFENEPILYGRSYTWLCYEVKIRRGHSNLLWDTGVFRGQMYSQPEHHAEMCFLSWFCGNQLSAYKCFQITWFVSWTPCPDCVAKLAKFLAEHPNVTLTISAARLYYYWERDYRRALCRLSQAGARVKIMDDEEFAYCWENFVYNEGQPFMPWYKFDDNYAFLHRTLKEIIRHLMDPDTFTFNFNNDPLVLRRHQTYLCYEVERLDNGTWVLMDQHMGFLCNEAKNLLCGFYGRHAELRFLDLVPSLQLDPAQIYRVTWFISWSPCFSWGCAGQVRAFLQENTHVRLRIFAARIYDYDPLYKEALQMLRDAGAQVSIMTYDEFEYCWDTFVYRQGCPFQPWDGLEEHSQALSGRLRAILQVRASSLCMVPHRPPPPPQSPGPCLPLCSEPPLGSLLPTGRPAPSLPFLLTASFSFPPPASLPPLPSLSLSPGHLPVPSFHSLTSCSIQPPCSSRIRETEGWASVSKEGRDLG

SEQ ID NO: 98 - protein, 190 aa, Homo sapiens
MNPQIRNPMKAMYPGTFYFQFKNLWEANDRNETWLCFTVEGIKRRSVVSWKTGVFRNQVDSETHCHAERCFLSWFCDDILSPNTKYQVTWYTSWSPCPDCAGEVAEFLARHSNVNLTIFTARLYYFQYPCYQEGLRSLSQEGVAVEIMDYEDFKYCWENFVYNDNEPFKPWKGLKTNFRLLKRRLRESLQ

SEQ ID NO: 99 - protein, 190 aa, Gorilla sp.
MNPQIRNPMKAMYPGTFYFQFKNLWEANDRNETWLCFTVEGIKRRSVVSWKTGVFRNQVDSETHCHAERCFLSWECDDILSPNTNYQVTWYTSWSPCPECAGEVAEFLARHSNVNLTIFTARLYYFQDTDYQEGLRSLSQEGVAVKIMDYKDFKYCWENFVYNDDEPFKPWKGLKYNFRFLKRRLQEILE

SEQ ID NO: 100 - protein, 199 aa, Homo sapiens
MEASPASGPRHLMDPHIFTSNFNNGIGRHKTYLCYEVERLDNGTSVKMDQHRGFLHNQAKNLLCGFYGRHAELRFLDLVPSLQLDPAQIYRVTWFISWSPCFSWGCAGEVRAFLQENTHVRLRIFAARIYDYDPLYKEALQMLRDAGAQVSIMTYDEFKHCWDTFVDHQGCPFQPWDGLDEHSQALSGRLRAILQNQGN

SEQ ID NO: 101 - protein, 202 aa, Macaca mulatta
MDGSPASRPRHLMDPNTFTFNFNNDLSVRGRHQTYLCYEVERLDNGTWVPMDERRGFLCNKAKNVPCGDYGCHVELRFLCEVPSWQLDPAQTYRVTWFISWSPCFRRGCAGQVRVFLQENKHVRLRIFAARIYDYDPLYQEALRTLRDAGAQVSIMTYEEFKHCWDTFVDRQGRPFQPWDGLDEHSQALSGRLRAILQNQGN

SEQ ID NO: 102 - protein, 185 aa, Bos sp.
MDEYTFTENFNNQGWPSKTYLCYEMERLDGDATIPLDEYKGFVRNKGLDQPEKPCHAELYFLGKIHSWNLDRNQHYRLTCFISWSPCYDCAQKLTTFLKENHHISLHILASRIYTHNRFGCHQSGLCELQAAGARITIMTFEDFKHCWETFVDHKGKPFQPWEGLNVKSQALCTELQAILKTQQN

SEQ ID NO: 103 - protein, 200 aa, Homo sapiens
MALLTAETFRLQFNNKRRLRRPYYPRKALLCYQLTPQNGSTPTRGYFENKKKCHAEICFINEIKSMGLDETQCYQVTCYLTWSPCSSCAWELVDFIKAHDHLNLGIFASRLYYHWCKPQQKGLRLLCGSQVPVEVMGFPKFADCWENFVDHEKPLSFNPYKMLEELDKNSRAIKRRLERIKIPGVRAQGRYMDILCDAEV

SEQ ID NO: 104 - protein, 210 aa, Macaca mulatta
MALLTAKTFSLQFNNKRRVNKPYYPRKALLCYQLTPQNGSTPTRGHLKNKKKDHAEIRFINKIKSMGLDETQCYQVTCYLTWSPCPSCAGELVDFIKAHRHLNLRIFASRLYYHWRPNYQEGLLLLCGSQVPVEVMGLPEFTDCWENFVDHKEPPSFNPSEKLEELDKNSQAIKRRLERIKSRSVDVLENGLRSLQLGPVTPSSSIRNSR

SEQ ID NO: 105 - protein, 386 aa, Homo sapiens
MNPQIRNPMERMYRDTFYDNFENEPILYGRSYTWLCYEVKIKRGRSNLLWDTGVFRGPVLPKRQSNHRQEVYFRFENHAEMCFLSWFCGNRLPANRRFQITWFVSWNPCLPCVVKVTKFLAEHPNVTLTISAARLYYYRDRDWRWVLLRLHKAGARVKIMDYEDFAYCWENFVCNEGQPFMPWYKFDDNYASLHRTLKEILRNPMEAMYPHIFYFHFKNLLKACGRNESWLCFTMEVTKHHSAVFRKRGVFRNQVDPETHCHAERCFLSWFCDDILSPNTNYEVTWYTSWSPCPECAGEVAEFLARHSNVNLTIFTARLCYFWDTDYQEGLCSLSQEGASVKIMGYKDFVSCWKNFVYSDDEPFKPWKGLQTNFRLLKRRLREILQ

SEQ ID NO: 106 - protein, 236 aa, Homo sapiens
MTSEKGPSTGDPTLRRRIEPWEFDVFYDPRELRKEACLLYEIKWGMSRKIWRSSGKNTTNHVEVNFIKKFTSERDFHPSMSCSITWFLSWSPCWECSQAIREFLSRHPGVTLVIYVARLFWHMDQQNRQGLRDLVNSGVTIQIMRASEYYHCWRNFVNYPPGDEAHWPQYPPLWMMLYALELHCIILSLPPCLKISRRWQNHLTFFRLHLQNCHYQTIPPHILLATGLIHPSVAWR

SEQ ID NO: 107 - protein, 229 aa, Mus sp.
MSSETGPVAVDPTLRRRIEPHEFEVFFDPRELRKETCLLYEINWGGRHSVWRHTSQNTSNHVEVNFLEKFTTERYFRPNTRCSITWFLSWSPCGECSRAITEFLSRHPYVTLFIYIARLYHHTDQRNRQGLRDLISSGVTIQIMTEQEYCYCWRNFVNYPPSNEAYWPRYPHLWVKLYVLELYCIILGLPPCLKILRRKQPQLTFFTITLQTCHYQRIPPHLLWATGLK

SEQ ID NO: 108 - protein, 229 aa, Rattus sp. [sequence omitted]

SEQ ID NO: 109 - protein, 224 aa, Homo sapiens
MAQKEEAAVATEAASQNGEDLENLDDPEKLKELIELPPFEIVTGERLPANFFKFQFRNVEYSSGRNKTFLCYVVEAQGKGGQVQASRGYLEDEHAAAHAEEAFFNTILPAFDPALRYNVTWYVSSSPCAACADRIIKTLSKTKNLRLLILVGRLFMWEEPEIQAALKKLKEAGCKLRIMKPQDFEYVWQNFVEQEEGESKAFQPWEDIQENFLYYEEKLADILK

SEQ ID NO: 110 - protein, 224 aa, Mus sp.
MAQKEEAAEAAAPASQNGDDLENLEDPEKLKELIDLPPFEIVTGVRLPVNFFKFQFRNVEYSSGRNKTFLCYVVEVQSKGGQAQATQGYLEDEHAGAHAEEAFFNTILPAFDPALKYNVTWYVSSSPCAACADRILKTLSKTKNLRLLILVSRLFMWEEPEVQAALKKLKEAGCKLRIMKPQDFEYIWQNFVEQEEGESKAFEPWEDIQENFLYYEEKLADILK

SEQ ID NO: 111 - protein, 224 aa, Rattus sp.
MAQKEEAAEAAAPASQNGDDLENLEDPEKLKELIDLPPFEIVTGVRLPVNFFKFQFRNVEYSSGRNKTFLCYVVEAQSKGGQVQATQGYLEDEHAGAHAEEAFFNTILPAFDPALKYNVTWYVSSSPCAACADRILKTLSKTKNLRLLILVSRLFMWEEPEVQAALKKLKEAGCKLRIMKPQDFEYLWQNFVEQEEGESKAFEPWEDIQENFLYYEEKLADILK

SEQ ID NO: 112 - protein, 224 aa, Bos sp.
MAQKEEAAAAAEPASQNGEEVENLEDPEKLKELIELPPFEIVTGERLPAHYFKFQFRNVEYSSGRNKTFLCYVVEAQSKGGQVQASRGYLEDEHATNHAEEAFFNSIMPTFDPALRYMVTWYVSSSPCAACADRIVKTLNKTKNLRLLILVGRLFMWEEPEIQAALRKLKEAGCRLRIMKPQDFEYIWQNFVEQEEGESKAFEPWEDIQENFLYYEEKLADILK

SEQ ID NO: 113 - protein, 208 aa, Petromyzon marinus
MTDAEYVRIHEKLDIYTFKKQFFNNKKSVSHRCYVLFELKRRGERRACFWGYAVNKPQSGTERGIHAEIFSIRKVEEYLRDNPGQFTINWYSSWSPCADCAEKILEWYNQELRGNGHTLKIWACKLYYEKNARNQIGLWNLRDNGVGLNVMVSEHYQCCRKIFIQSSHNQLNENRWLEKTLKRAEKRRSELSFMIQVKILHTTKSPAV

SEQ ID NO: 114 - protein, 381 aa, Artificial Sequence
  Description of Artificial Sequence: Synthetic polypeptide
MKPHFRNTVERMYRDTFSYNFYNRPILSRRNTVWLCYEVKTKGPSRPPLDAKIFRGQVYSELKYHPEMRFFHWFSKWRKLHRDQEYEVTWYISWSPCTKCTRDMATFLAEDPKVTLTIFVARLYYFWDPDYQEALRSLCQKRDGPRATMKFNYDEFQHCWSKFVYSQRELFEPWNNLPKYYILLHFMLGEILRHSMDPPTFTFNFNNEPWVRGRHETYLCYEVERMHNDTWVLLNQRRGFLCNQAPHKHGFLEGRHAELCFLDVIPFWKLDLDQDYRVTCFTSWSPCFSCAQEMAKFISKKHVSLCIFTARIYRRQGRCQEGLRTLAEAGAKISFTYSEFKHCWDTFVDHQGCPFQPWDGLDEHSQDLSGRLRAILQNQEN

SEQ ID NO: 115 - protein, 182 aa, Homo sapiens
MDPPTFTFNFNNEPWWGRHETYLCYEVERMHNDTWVLLNQRRGFLCNQAPHKHGFLEGRHAELCFLDVIPFWKLDLDQDYRVTCFTSWSPCFSCAQEMAKFISKNKHVSLCIFTARIYDDQGRCQEGLRTLAEAGAKISFTYSEFKHCWDTFVDHQGCPFQPWDGLDEHSQDLSGRLRAILQ

SEQ ID NO: 116 - protein, 184 aa, Artificial Sequence
  Description of Artificial Sequence: Synthetic polypeptide
MDPPTFTFNFNNEPWVRGRHETYLCYEVERMHNDTWVLLNQRRGFLCNQAPHKHGFLEGRHAELCFLDVIPFWKLDLDQDYRVTCFTSWSPCFSCAQEMAKFISKNKHVSLCIFTARIYRRQGRCQEGLRTLAEAGAKISFMTYSEFKHCWDTFVDHQGCPFQPWDGLDEHSQDLSGRLRAILQ

SEQ ID NO: 117 - protein, 8 aa, Artificial Sequence
  Description of Artificial Sequence: Synthetic peptide
SGGSSGGS

SEQ ID NO: 118 - protein, 4 aa, Artificial Sequence
  Description of Artificial Sequence: Synthetic peptide
SGGS

SEQ ID NO: 119 - protein, 4 aa, Artificial Sequence
  Description of Artificial Sequence: Synthetic peptide
GGGS

SEQ ID NO: 120 - protein, 5 aa, Artificial Sequence
  Description of Artificial Sequence: Synthetic peptide
GGGGS

SEQ ID NO: 121 - protein, 5 aa, Artificial Sequence
  Description of Artificial Sequence: Synthetic peptide
EAAAK

SEQ ID NO: 122 - protein, 21 aa, Artificial Sequence
  Description of Artificial Sequence: Synthetic peptide
  MISC_FEATURE (1)..(21): This sequence may encompass 1, 3 or 7 "Gly Gly Ser" repeating units
GGSGGSGGSGGSGGSGGSGGS

SEQ ID NO: 123 - protein, 5 aa, Artificial Sequence
  Description of Artificial Sequence: Synthetic peptide
PAPAP

SEQ ID NO: 124 - protein, 6 aa, Artificial Sequence
  Description of Artificial Sequence: Synthetic peptide
PAPAPA

SEQ ID NO: 125 - protein, 7 aa, Artificial Sequence
  Description of Artificial Sequence: Synthetic peptide
PAPAPAP

SEQ ID NO: 126 - protein, 8 aa, Artificial Sequence
  Description of Artificial Sequence: Synthetic peptide
PAPAPAPA

SEQ ID NO: 127 - protein, 9 aa, Artificial Sequence
  Description of Artificial Sequence: Synthetic peptide
PAPAPAPAP

SEQ ID NO: 128 - protein, 15 aa, Artificial Sequence
  Description of Artificial Sequence: Synthetic peptide
PAPAPAPAPAPAPAP

SEQ ID NO: 129 - protein, 21 aa, Artificial Sequence
  Description of Artificial Sequence: Synthetic peptide
PAPAPAPAPAPAPAPAPAPAP

SEQ ID NO: 130 - protein, 2216 aa, Artificial Sequence
  Description of Artificial Sequence: Synthetic polypeptide
MPKKKRKVSEVEFSHEYWMRHALTLAKRAWDEREVPVGAVLVHNNRVIGEGWNRPIGRHDPTAHAEIMALRQGGLVMQNYRLIDATLYVTLEPCVMCAGAMIHSRIGRVVFGARDAKTGAAGSLMDVLHHPGMNHRVEITEGILADECAALLSDFFRMRRQEIKAQKKAQSSTDSGGSSGGSSGSETPGTSESATPESSGGSSGGSSEVEFSHEYWMRHALTLAKRARDEREVPVGAVLVLNNRVIGEGWNRAIGLHDPTAHAEIMALRQGGLVMQNYRLIDATLYVTFEPCVMCAGAMIHSRIGRVVFGVRNAKTGAAGSLMDVLHYPGMNHRVEITEGILADECAALLCYFFRMPRQVFNAQKKAQSSTDSGGSSGGSSGSETPGTSESATPEDKKYSIGLAIGTNSVGWAVITDEYKVPSKKFKVLGNTDRHSIKKNLIGALLFDSGETAEATRLKRTARRRYTRRKNRICYLQEIFSNEMAKVDDSFFHRLEESFLVEEDKKHERHPIFGNIVDEVAYHEKYPTIYHLRKKLVDSTDKADLRLIYLALAHMIKFRGHFLIEGDLNPDNSDVDKLFIQLVQTYNQLFEENPINASGVDAKAILSARLSKSRRLENLIAQLPGEKKNGLFGNLIALSLGLTPNFKSNFDLAEDAKLQLSKDTYDDDLDNLLAQIGDQYADLFLAAKNLSDAILLSDILRVNTEITKAPLSASMIKRYDEHHQDLTLLKALVRQQLPEKYKEIFFDQSKNGYAGYIDGGASQEEFYKFIKPILEKMDGTEELLVKLNREDLLRKQRTFDNGSIPHQIHLGELHAILRRQEDFYPFLKDNREKIEKILTFRIPYYVGPLARGNSRFAWMTRKSEETITPWNFEEVVDKGASAQSFIERMTNFDKNLPNEKVLPKHSLLYEYFTVYNELTKVKYVTEGMRKPAFLSGEQKKAIVDLLFKTNRKVTVKQLKEDYFKKIECFDSVEISGVEDRFNASLGTYHDLLKIIKDKDFLDNEENEDILEDIVLTLTLFEDREMIEERLKTYAHLFDDKVMKQLKRRRYTGWGRLSRKLINGIRDKQSGKTILDFLKSDGFANRNFMQLIHDDSLTFKEDIQKAQVSGQGDSLHEHIANLAGSPAIKKGILQTVKVVDELVKVMGRHKPENIVIEMARENQTTQKGQKNSRERMKRIEEGIKELGSQILKEHPVENTQLQNEKLYLYYLQNGRDMYVDQELDINRLSDYDVDHIVPQSFLKDDSIDNKVLTRSDKNRGKSDNVPSEEVVKKMKNYWRQLLNAKLITQRKFDNLTKAERGGLSELDKAGFIKRQLVETRQITKHVAQILDSRMNTKYDENDKLIREVKVITLKSKLVSDFRKDFQFYKVREINNYHHAHDAYLNAVVGTALIKKYPKLESEFVYGDYKVYDVRKMIAKSEQEIGKATAKYFFYSNIMNFFKTEITLANGEIRKRPLIETNGETGEIVWDKGRDFATVRKVLSMPQVNIVKKTEVQTGGFSKESILPKRNSDKLIARKKDWDPKKYGGFDSPTVAYSVLVVAKVEKGKSKKLKSVKELLGITIMERSSFEKNPIDFLEAKGYKEVKKDLIIKLPKYSLFELENGRKRMLASAGELQKGNELALPSKYVNFLYLASHYEKLKGSPEDNEQKQLFVEQHKHYLDEIIEQISEFSKRVILADANLDKVLSAYNKHRDKPIREQAENIIHLFTLTNLGAPAAFKYFDTTIDRKRYTSTKEVLDATLIHQSITGLYETRIDLSQLGGDSGGSSGGSSGSETPGTSESATPESSGGSSGGSTDAEYVRIHEKLDIYTFKKQFFNNKKSVSHRCYVLFELKRRGERRACFWGYAVNKPQSGTERGIHAEIFSIRKVEEYLRDNPGQFTINWYSSWSPCADCAEKILEWYNQELRGNGHTLKIWACKLYYEKNARNQIGLWNLRDNGVGLNVMVSEHYQCCRKIFIQSSHNQLNENRWLEKTLKRAEKRRSELSIMIQVKILHTTKSPAVSGGSGGSGGSTNLSDIIEKETGKQLVIQESILMLPEEVEEVIGNKPESDILVHTAYDESTDENVMLLTSDAPEYKPWALVIQDSNGENKIKMLSGGSGGSGGSTNLSDIIEKETGKQLVIQESILMLPEEVEEVIGNKPESDILVHTAYDESTDENVMLLTSDAPEYKPWALVIQDSNGENKIKMLPKKKRKVEGADKRTADGSEFESPKKKRKV

SEQ ID NO: 131 - protein, 2299 aa, Artificial Sequence
  Description of Artificial Sequence: Synthetic polypeptide
MPKKKRKVSEVEFSHEYWMRHALTLAKRAWDEREVPVGAVLVHNNRVIGEGWNRPIGRHDPTAHAEIMALRQGGLVMQNYRLIDATLYVTLEPCVMCAGAMIHSRIGRVVFGARDAKTGAAGSLMDVLHHPGMNHRVEITEGILADECAALLSDFFRMRRQEIKAQKKAQSSTDSGGSSGGSSGSETPGTSESATPESSGGSSGGSSEVEFSHEYWMRHALTLAKRARDEREVPVGAVLVLNNRVIGEGWNRAIGLHDPTAHAEIMALRQGGLVMQNYRLIDATLYVTFEPCVMCAGAMIHSRIGRVVFGVRNAKTGAAGSLMDVLHYPGMNHRVEITEGILADECAALLCYFFRMPRQVFNAQKKAQSSTDSGGSSGGSSGSETPGTSESATPEDKKYSIGLAIGTNSVGWAVITDEYKVPSKKFKVLGNTDRHSIKKNLIGALLFDSGETAEATRLKRTARRRYTRRKNRICYLQEIFSNEMAKVDDSFFHRLEESFLVEEDKKHERHPIFGNIVDEVAYHEKYPTIYHLRKKLVDSTDKADLRLIYLALAHMIKFRGHFLIEGDLNPDNSDVDKLFIQLVQTYNQLFEENPINASGVDAKAILSARLSKSRRLENLIAQLPGEKKNGLFGNLIALSLGLTPNFKSNFDLAEDAKLQLSKDTYDDDLDNLLAQIGDQYADLFLAAKNLSDAILLSDILRVNTEITKAPLSASMIKRYDEHHQDLTLLKALVRQQLPEKYKEIFFDQSKNGYAGYIDGGASQEEFYKFIKPILEKMDGTEELLVKLNREDLLRKQRTFDNGSIPHQIHLGELHAILRRQEDFYPFLKDNREKIEKILTFRIPYYVGPLARGNSRFAWMTRKSEETITPWNFEEVVDKGASAQSFIERMTNFDKNLPNEKVLPKHSLLYEYFTVYNELTKVKYVTEGMRKPAFLSGEQKKAIVDLLFKTNRKVTVKQLKEDYFKKIECFDSVEISGVEDRFNASLGTYHDLLKIIKDKDFLDNEENEDILEDIVLTLTLFEDREMIEERLKTYAHLFDDKVMKQLKRRRYTGWGRLSRKLINGIRDKQSGKTILDFLKSDGFANRNFMQLIHDDSLTFKEDIQKAQVSGQGDSLHEHIANLAGSPAIKKGILQTVKVVDELVKVMGRHKPENIVIEMARENQTTQKGQKNSRERMKRIEEGIKELGSQILKEHPVENTQLQNEKLYLYYLQNGRDMYVDQELDINRLSDYDVDHIVPQSFLKDDSIDNKVLTRSDKNRGKSDNVPSEEVVKKMKNYWRQLLNAKLITQRKFDNLTKAERGGLSELDKAGFIKRQLVETRQITKHVAQILDSRMNTKYDENDKLIREVKVITLKSKLVSDFRKDFQFYKVREINNYHHAHDAYLNAVVGTALIKKYPKLESEFVYGDYKVYDVRKMIAKSEQEIGKATAKYFFYSNIMNFFKTEITLANGEIRKRPLIETNGETGEIVWDKGRDFATVRKVLSMPQVNIVKKTEVQTGGFSKESILPKRNSDKLIARKKDWDPKKYGGFDSPTVAYSVLVVAKVEKGKSKKLKSVKELLGITIMERSSFEKNPIDFLEAKGYKEVKKDLIIKLPKYSLFELENGRKRMLASAGELQKGNELALPSKYVNFLYLASHYEKLKGSPEDNEQKQLFVEQHKHYLDEIIEQISEFSKRVILADANLDKVLSAYNKHRDKPIREQAENIIHLFTLTNLGAPAAFKYFDTTIDRKRYTSTKEVLDATLIHQSITGLYETRIDLSQLGGDSRADPKKKRKVGGGGTGGGGSAEYVRALFDFNGNDEEDLPFKKGDILRIRDKPEEQWWNAEDSEGKRGMILVPYVEKYSGDYKDHDGDYKDHDIDYKDDDDKSGMTDAEYVRIHEKLDIYTFKKQFFNNKKSVSHRCYVLFELKRRGERRACFWGYAVNKPQSGTERGIHAEIFSIRKVEEYLRDNPGQFTINWYSSWSPCADCAEKILEWYNQELRGNGHTLKIWACKLYYEKNARNQIGLWNLRDNGVGLNVMVSEHYQCCRKIFIQSSHNQLNENRWLEKTLKRAEKWRSELSIMIQVKILHTTKSPAVGPKKKRKVGTSGGSGGSGGSTNLSDIIEKETGKQLVIQESILMLPEEVEEVIGNKPESDILVHTAYDESTDENVMLLTSDAPEYKPWALVIQDSNGENKIKMLSGGSGGSGGSTNLSDIIEKETGKQLVIQESILMLPEEVEEVIGNKPESDILVHTAYDESTDENVMLLTSDAPEYKPWALVIQDSNGENKIKMLPKKKRKVEGADKRTADGSEFESPKKKRKV

SEQ ID NO: 132 - protein, 2319 aa, Artificial Sequence
  Description of Artificial Sequence: Synthetic polypeptide
MPKKKRKVSEVEFSHEYWMRHALTLAKRAWDEREVPVGAVLVHNNRVIGEGWNRPIGRHDPTAHAEIMALRQGGLVMQNYRLIDATLYVTLEPCVMCAGAMIHSRIGRVVFGARDAKTGAAGSLMDVLHHPGMNHRVEITEGILADECAALLSDFFRMRRQEIKAQKKAQSSTDSGGSSGGSSGSETPGTSESATPESSGGSSGGSSEVEFSHEYWMRHALTLAKRARDEREVPVGAVLVLNNRVIGEGWNRAIGLHDPTAHAEIMALRQGGLVMQNYRLIDATLYVTFEPCVMCAGAMIHSRIGRVVFGVRNAKTGAAGSLMDVLHYPGMNHRVEITEGILADECAALLCYFFRMPRQVFNAQKKAQSSTDSGGSSGGSSGSETPGTSESATPEDKKYSIGLAIGTNSVGWAVITDEYKVPSKKFKVLGNTDRHSIKKNLIGALLFDSGETAEATRLKRTARRRYTRRKNRICYLQEIFSNEMAKVDDSFFHRLEESFLVEEDKKHERHPIFGNIVDEVAYHEKYPTIYHLRKKLVDSTDKADLRLIYLALAHMIKFRGHFLIEGDLNPDNSDVDKLFIQLVQTYNQLFEENPINASGVDAKAILSARLSKSRRLENLIAQLPGEKKNGLFGNLIALSLGLTPNFKSNFDLAEDAKLQLSKDTYDDDLDNLLAQIGDQYADLFLAAKNLSDAILLSDILRVNTEITKAPLSASMIKRYDEHHQDLTLLKALVRQQLPEKYKEIFFDQSKNGYAGYIDGGASQEEFYKFIKPILEKMDGTEELLVKLNREDLLRKQRTFDNGSIPHQIHLGELHAILRRQEDFYPFLKDNREKIEKILTFRIPYYVGPLARGNSRFAWMTRKSEETITPWNFEEVVDKGASAQSFIERMTNFDKNLPNEKVLPKHSLLYEYFTVYNELTKVKYVTEGMRKPAFLSGEQKKAIVDLLFKTNRKVTVKQLKEDYFKKIECFDSVEISGVEDRFNASLGTYHDLLKIIKDKDFLDNEENEDILEDIVLTLTLFEDREMIEERLKTYAHLFDDKVMKQLKRRRYTGWGRLSRKLINGIRDKQSGKTILDFLKSDGFANRNFMQLIHDDSLTFKEDIQKAQVSGQGDSLHEHIANLAGSPAIKKGILQTVKVVDELVKVMGRHKPENIVIEMARENQTTQKGQKNSRERMKRIEEGIKELGSQILKEHPVENTQLQNEKLYLYYLQNGRDMYVDQELDINRLSDYDVDHIVPQSFLKDDSIDNKVLTRSDKNRGKSDNVPSEEVVKKMKNYWRQLLNAKLITQRKFDNLTKAERGGLSELDKAGFIKRQLVETRQITKHVAQILDSRMNTKYDENDKLIREVKVITLKSKLVSDFRKDFQFYKVREINNYHHAHDAYLNAVVGTALIKKYPKLESEFVYGDYKVYDVRKMIAKSEQEIGKATAKYFFYSNIMNFFKTEITLANGEIRKRPLIETNGETGEIVWDKGRDFATVRKVLSMPQVNIVKKTEVQTGGFSKESILPKRNSDKLIARKKDWDPKKYGGFDSPTVAYSVLVVAKVEKGKSKKLKSVKELLGITIMERSSFEKNPIDFLEAKGYKEVKKDLIIKLPKYSLFELENGRKRMLASAGELQKGNELALPSKYVNFLYLASHYEKLKGSPEDNEQKQLFVEQHKHYLDEIIEQISEFSKRVILADANLDKVLSAYNKHRDKPIREQAENIIHLFTLTNLGAPAAFKYFDTTIDRKRYTSTKEVLDATLIHQSITGLYETRIDLSQLGGDSRADPKKKRKVGGGGTGGGGSAEYVRALFDFNGNDEEDLPFKKGDILRIRDKPEEQWWNAEDSEGKRGMILVPYVEKYSGDYKDHDGDYKDHDIDYKDDDDKSGSSETGPVAVDPTLRRRIEPHEFEVFFDPRELRKETCLLYEINWGGRHSIWRHTSQNTNKHVEVNFIEKFTTERYFCPNTRCSITWFLSWSPCGECSRAITEFLSRYPHVTLFIYIARLYHHADPRNRQGLRDLISSGVTIQIMTEQESGYCWRNFVNYSPSNEAHWPRYPHLWVRLYVLELYCIILGLPPCLNILRRKQPQLTFFTIALQSCHYQRLPPHILWATGLKGPKKKRKVGTSGGSGGSGGSTNLSDIIEKETGKQLVIQESILMLPEEVEEVIGNKPESDILVHTAYDESTDENVMLLTSDAPEYKPWALVIQDSNGENKIKMLSGGSGGSGGSTNLSDIIEKETGKQLVIQESILMLPEEVEEVIGNKPESDILVHTAYDESTDENVMLLTSDAPEYKPWALVIQDSNGENKIKMLPKKKRKVEGADKRTADGSEFESPKKKRKV

SEQ ID NO: 133 - DNA, 20 bp, Unknown
  Description of Unknown: Target sequence
gaacacaaagcatagactgc

SEQ ID NO: 134 - DNA, 20 bp, Unknown
  Description of Unknown: Target sequence
gaatactaagcatagactcc

SEQ ID NO: 135 - DNA, 20 bp, Unknown
  Description of Unknown: HBG1 target site
cttgaccaatagccttgaca

SEQ ID NO: 136 - DNA, 23 bp, Artificial Sequence
  Description of Artificial Sequence: Synthetic oligonucleotide
gaacacaaagcatagactgcggg

SEQ ID NO: 137 - DNA, 23 bp, Artificial Sequence
  Description of Artificial Sequence: Synthetic oligonucleotide
gaatgtaaagcatagactgcggg

SEQ ID NO: 138 - DNA, 23 bp, Artificial Sequence
  Description of Artificial Sequence: Synthetic oligonucleotide
gaacgcaaagcatagactgcggg

SEQ ID NO: 139 - DNA, 23 bp, Artificial Sequence
  Description of Artificial Sequence: Synthetic oligonucleotide
gaatgcaaagcatagactgcggg

SEQ ID NO: 140 - DNA, 23 bp, Artificial Sequence
  Description of Artificial Sequence: Synthetic oligonucleotide
gaatgtgaagcatagactgcggg

SEQ ID NO: 141 - DNA, 23 bp, Artificial Sequence
  Description of Artificial Sequence: Synthetic oligonucleotide
gaacgcgaagcatagactgcggg

SEQ ID NO: 142 - DNA, 23 bp, Artificial Sequence
  Description of Artificial Sequence: Synthetic oligonucleotide
gaacgtaaagcatagactgcggg

SEQ ID NO: 143 - DNA, 23 bp, Artificial Sequence
  Description of Artificial Sequence: Synthetic oligonucleotide
gaacgtgaagcatagactgcggg

SEQ ID NO: 144 - DNA, 23 bp, Artificial Sequence
  Description of Artificial Sequence: Synthetic oligonucleotide
gaatgcgaagcatagactgcggg

SEQ ID NO: 145 - DNA, 23 bp, Artificial Sequence
  Description of Artificial Sequence: Synthetic oligonucleotide
gaatggaaagcatagactgcggg

SEQ ID NO: 146 - DNA, 23 bp, Artificial Sequence
  Description of Artificial Sequence: Synthetic oligonucleotide
gaaagtaaagcatagactgcggg

SEQ ID NO: 147 - DNA, 23 bp, Artificial Sequence
  Description of Artificial Sequence: Synthetic oligonucleotide
gaaagcaaagcatagactgcggg

SEQ ID NO: 148 - DNA, 23 bp, Artificial Sequence
  Description of Artificial Sequence: Synthetic oligonucleotide
gaacggaaagcatagactgcggg

SEQ ID NO: 149 - DNA, 23 bp, Artificial Sequence
  Description of Artificial Sequence: Synthetic oligonucleotide
gaatgtaaagtatagactgcggg

SEQ ID NO: 150 - DNA, 23 bp, Artificial Sequence
  Description of Artificial Sequence: Synthetic oligonucleotide
gaaggcaaagcatagactgcggg

SEQ ID NO: 151 - DNA, 23 bp, Artificial Sequence
  Description of Artificial Sequence: Synthetic oligonucleotide
gaacacaaagcatagactgcggg

SEQ ID NO: 152 - DNA, 23 bp, Artificial Sequence
  Description of Artificial Sequence: Synthetic oligonucleotide
gaacacaaagcatagactgcggg

SEQ ID NO: 153 - DNA, 23 bp, Artificial Sequence
  Description of Artificial Sequence: Synthetic oligonucleotide
gaatgtaaagcatagactgcggg

SEQ ID NO: 154 - DNA, 23 bp, Artificial Sequence
  Description of Artificial Sequence: Synthetic oligonucleotide
gaacgcaaagcatagactgcggg

SEQ ID NO: 155 - DNA, 23 bp, Artificial Sequence
  Description of Artificial Sequence: Synthetic oligonucleotide
gaatgcaaagcatagactgcggg

SEQ ID NO: 156 - DNA, 23 bp, Artificial Sequence
  Description of Artificial Sequence: Synthetic oligonucleotide
gaatgtgaagcatagactgcggg

SEQ ID NO: 157 - DNA, 23 bp, Artificial Sequence
  Description of Artificial Sequence: Synthetic oligonucleotide
gaacgcgaagcatagactgcggg

SEQ ID NO: 158 - DNA, 23 bp, Artificial Sequence
  Description of Artificial Sequence: Synthetic oligonucleotide
gaacgtaaagcatagactgcggg

SEQ ID NO: 159 - DNA, 23 bp, Artificial Sequence
  Description of Artificial Sequence: Synthetic oligonucleotide
gaacgtgaagcatagactgcggg

SEQ ID NO: 160 - DNA, 23 bp, Artificial Sequence
  Description of Artificial Sequence: Synthetic oligonucleotide
gaatgcgaagcatagactgcggg

SEQ ID NO: 161 - DNA, 23 bp, Artificial Sequence
  Description of Artificial Sequence: Synthetic oligonucleotide
gaatggaaagcatagactgcggg

SEQ ID NO: 162 - DNA, 23 bp, Artificial Sequence
  Description of Artificial Sequence: Synthetic oligonucleotide
gaaagtaaagcatagactgcggg

SEQ ID NO: 163 - DNA, 23 bp, Artificial Sequence
  Description of Artificial Sequence: Synthetic oligonucleotide
gaaagcaaagcatagactgcggg

SEQ ID NO: 164 - DNA, 23 bp, Artificial Sequence
  Description of Artificial Sequence: Synthetic oligonucleotide
gaacggaaagcatagactgcggg

SEQ ID NO: 165 - DNA, 23 bp, Artificial Sequence
  Description of Artificial Sequence: Synthetic oligonucleotide
gaatgtaaagtatagactgcggg

SEQ ID NO: 166 - DNA, 23 bp, Artificial Sequence
  Description of Artificial Sequence: Synthetic oligonucleotide
gaaggcaaagcatagactgcggg

SEQ ID NO: 167 - DNA, 23 bp, Artificial Sequence
  Description of Artificial Sequence: Synthetic oligonucleotide
gaatgtgaagtatagactgcggg

SEQ ID NO: 168 - DNA, 23 bp, Artificial Sequence
  Description of Artificial Sequence: Synthetic oligonucleotide
gagcgcaaagcatagactgcggg

SEQ ID NO: 169 - DNA, 23 bp, Artificial Sequence
  Description of Artificial Sequence: Synthetic oligonucleotide
gaaggtaaagcatagactgcggg

SEQ ID NO: 170 - DNA, 23 bp, Artificial Sequence
  Description of Artificial Sequence: Synthetic oligonucleotide
gagtgtaaagcatagactgcggg

SEQ ID NO: 171 - DNA, 23 bp, Artificial Sequence
  Description of Artificial Sequence: Synthetic oligonucleotide
gaatgcaaagtatagactgcggg

SEQ ID NO: 172 - DNA, 23 bp, Artificial Sequence
  Description of Artificial Sequence: Synthetic oligonucleotide
gaaagaaaagcatagactgcggg

SEQ ID NO: 173 - DNA, 23 bp, Artificial Sequence
  Description of Artificial Sequence: Synthetic oligonucleotide
gaatgaaaagcatagactgcggg

SEQ ID NO: 174 - DNA, 23 bp, Artificial Sequence
  Description of Artificial Sequence: Synthetic oligonucleotide
gaatgggaagcatagactgcggg

SEQ ID NO: 175 - DNA, 23 bp, Artificial Sequence
  Description of Artificial Sequence: Synthetic oligonucleotide
gaacgggaagcatagactgcggg

SEQ ID NO: 176 - DNA, 23 bp, Artificial Sequence
  Description of Artificial Sequence: Synthetic oligonucleotide
gaatataaagcatagactgcggg

SEQ ID NO: 177 - DNA, 23 bp, Artificial Sequence
  Description of Artificial Sequence: Synthetic oligonucleotide
gaatgcaaagcatagactgtggg

SEQ ID NO: 178 - DNA, 23 bp, Artificial Sequence
  Description of Artificial Sequence: Synthetic oligonucleotide
gaacgcaaggcatagactgcggg

SEQ ID NO: 179 - DNA, 23 bp, Artificial Sequence
  Description of Artificial Sequence: Synthetic oligonucleotide
gaatgtggagcatagactgcggg

SEQ ID NO: 180 - DNA, 23 bp, Artificial Sequence
  Description of Artificial Sequence: Synthetic oligonucleotide
gagtgtgaagcatagactgcggg

SEQ ID NO: 181 - DNA, 23 bp, Artificial Sequence
  Description of Artificial Sequence: Synthetic oligonucleotide
gaaagtgaagcatagactgcggg

SEQ ID NO: 182 - DNA, 23 bp, Artificial Sequence
  Description of Artificial Sequence: Synthetic oligonucleotide
gaacgcagagcatagactgcggg

SEQ ID NO: 183 - DNA, 23 bp, Artificial Sequence
  Description of Artificial Sequence: Synthetic oligonucleotide
gaacgaaaagcatagactgcggg

SEQ ID NO: 184 - DNA, 23 bp, Artificial Sequence
  Description of Artificial Sequence: Synthetic oligonucleotide
gagcgcgaagcatagactgcggg

SEQ ID NO: 185 - DNA, 23 bp, Artificial Sequence
  Description of Artificial Sequence: Synthetic oligonucleotide
gaattgaaagcatagactgcggg

SEQ ID NO: 186 - DNA, 23 bp, Artificial Sequence
  Description of Artificial Sequence: Synthetic oligonucleotide
gaaagcgaagcatagactgcggg

SEQ ID NO: 187 - DNA, 23 bp, Artificial Sequence
  Description of Artificial Sequence: Synthetic oligonucleotide
gaaaacaaagcatagactgcggg

SEQ ID NO: 188 - DNA, 23 bp, Artificial Sequence
  Description of Artificial Sequence: Synthetic oligonucleotide
gaaggtgaagcatagactgcggg

SEQ ID NO: 189 - DNA, 23 bp, Artificial Sequence
  Description of Artificial Sequence: Synthetic oligonucleotide
gaacacaaagcatagactgcagg

SEQ ID NO: 190 - DNA, 23 bp, Artificial Sequence
  Description of Artificial Sequence: Synthetic oligonucleotide
gaattcaaagcatagactgcggg

SEQ ID NO: 191 - DNA, 23 bp, Artificial Sequence
  Description of Artificial Sequence: Synthetic oligonucleotide
gagtgcaaagcatagactgcggg

SEQ ID NO: 192 - DNA, 23 bp, Artificial Sequence
  Description of Artificial Sequence: Synthetic oligonucleotide
gaatgcagagcatagactgcggg

SEQ ID NO: 193 - DNA, 23 bp, Artificial Sequence
  Description of Artificial Sequence: Synthetic oligonucleotide
gaacacaaagcatagactgtggg

SEQ ID NO: 194 - DNA, 23 bp, Artificial Sequence
  Description of Artificial Sequence: Synthetic oligonucleotide
gaatagaaagcatagactgcggg

SEQ ID NO: 195 - DNA, 23 bp, Artificial Sequence
  Description of Artificial Sequence: Synthetic oligonucleotide
gaaaggaaagcatagactgcggg

SEQ ID NO: 196 - DNA, 23 bp, Artificial Sequence
  Description of Artificial Sequence: Synthetic oligonucleotide
gaacgcaaagtatagactgcggg

SEQ ID NO: 197 - DNA, 23 bp, Artificial Sequence
  Description of Artificial Sequence: Synthetic oligonucleotide
gaatacaaagcatagactgcggg

SEQ ID NO: 198 - DNA, 23 bp, Artificial Sequence
  Description of Artificial Sequence: Synthetic oligonucleotide
gaatgtaaggcatagactgcggg

SEQ ID NO: 199 - DNA, 23 bp, Artificial Sequence
  Description of Artificial Sequence: Synthetic oligonucleotide
gaatgtaaagcatagactgtggg

SEQ ID NO: 200 - DNA, 23 bp, Artificial Sequence
  Description of Artificial Sequence: Synthetic oligonucleotide
gaacacaaagtatagactgcggg

SEQ ID NO: 201 - DNA, 23 bp, Artificial Sequence
  Description of Artificial Sequence: Synthetic oligonucleotide
gaacgtaaagtatagactgcggg

SEQ ID NO: 202 - DNA, 23 bp, Artificial Sequence
  Description of Artificial Sequence: Synthetic oligonucleotide
gaacacaaagcatagactgcgga

SEQ ID NO: 203 - DNA, 23 bp, Artificial Sequence
  Description of Artificial Sequence: Synthetic oligonucleotide
gaaccgaaagcatagactgcggg

SEQ ID NO: 204 - DNA, 23 bp, Artificial Sequence
  Description of Artificial Sequence: Synthetic oligonucleotide
gaaggcgaagcatagactgcggg

SEQ ID NO: 205 - DNA, 23 bp, Artificial Sequence
  Description of Artificial Sequence: Synthetic oligonucleotide
gaaaataaagcatagactgcggg

SEQ ID NO: 206 - DNA, 23 bp, Artificial Sequence
  Description of Artificial Sequence: Synthetic oligonucleotide
gaacacaaagcatagactgcgag

SEQ ID NO: 207 - DNA, 23 bp, Artificial Sequence
  Description of Artificial Sequence: Synthetic oligonucleotide
gaatgtagagcatagactgcggg

SEQ ID NO: 208 - DNA, 23 bp, Artificial Sequence
  Description of Artificial Sequence: Synthetic oligonucleotide
gaaaaaaaagcatagactgcggg

SEQ ID NO: 209 - DNA, 23 bp, Artificial Sequence
  Description of Artificial Sequence: Synthetic oligonucleotide
gaatgtgaaacatagactgcggg

SEQ ID NO: 210 - DNA, 23 bp, Artificial Sequence
  Description of Artificial Sequence: Synthetic oligonucleotide
gaatttaaagcatagactgcggg

SEQ ID NO: 211 - DNA, 23 bp, Artificial Sequence
  Description of Artificial Sequence: Synthetic oligonucleotide
gaactcaaagcatagactgcggg

SEQ ID NO: 212 - DNA, 23 bp, Artificial Sequence
  Description of Artificial Sequence: Synthetic oligonucleotide
gaacgcaaagcgtagactgcggg

SEQ ID NO: 213 - DNA, 23 bp, Artificial Sequence
  Description of Artificial Sequence: Synthetic oligonucleotide
gaaagagaagcatagactgcggg

SEQ ID NO: 214 - DNA, 23 bp, Artificial Sequence
  Description of Artificial Sequence: Synthetic oligonucleotide
gaatgcaaggcatagactgcggg

SEQ ID NO: 215 - DNA, 23 bp, Artificial Sequence
  Description of Artificial Sequence: Synthetic oligonucleotide
gaatgtgaggcatagactgcggg

SEQ ID NO: 216 - DNA, 23 bp, Artificial Sequence
  Description of Artificial Sequence: Synthetic oligonucleotide
gaacataaagcatagactgcggg

SEQ ID NO: 217 - DNA, 23 bp, Artificial Sequence
  Description of Artificial Sequence: Synthetic oligonucleotide
gaacaaaaagcatagactgcggg

SEQ ID NO: 218 - DNA, 23 bp, Artificial Sequence
  Description of Artificial Sequence: Synthetic oligonucleotide
aaatgcaaagcatagactgcggg

SEQ ID NO: 219 - DNA, 23 bp, Artificial Sequence
  Description of Artificial Sequence: Synthetic oligonucleotide
gaaattaaagcatagactgcggg

SEQ ID NO: 220 - DNA, 23 bp, Artificial Sequence
  Description of Artificial Sequence: Synthetic oligonucleotide
gaacgcaaagcatagactgtggg

SEQ ID NO: 221 - DNA, 23 bp, Artificial Sequence
  Description of Artificial Sequence: Synthetic oligonucleotide
gaacccaaagcatagactgcggg

SEQ ID NO: 222 - DNA, 23 bp, Artificial Sequence
  Description of Artificial Sequence: Synthetic oligonucleotide
gaacgcaaagcatagactgcgag

SEQ ID NO: 223 - DNA, 23 bp, Artificial Sequence
  Description of Artificial Sequence: Synthetic oligonucleotide
gaacacaaagcatagattgcggg

SEQ ID NO: 224 - DNA, 23 bp, Artificial Sequence
  Description of Artificial Sequence: Synthetic oligonucleotide
gaaagtaaagtatagactgcggg

SEQ ID NO: 225 - DNA, 23 bp, Artificial Sequence
  Description of Artificial Sequence: Synthetic oligonucleotide
gaacgagaagcatagactgcggg

SEQ ID NO: 226 - DNA, 23 bp, Artificial Sequence
  Description of Artificial Sequence: Synthetic oligonucleotide
taacacaaagcatagactgcggg

SEQ ID NO: 227 - DNA, 23 bp, Artificial Sequence
  Description of Artificial Sequence: Synthetic oligonucleotide
gaacgcgaagtatagactgcggg

SEQ ID NO: 228 - DNA, 23 bp, Artificial Sequence
  Description of Artificial Sequence: Synthetic oligonucleotide
gaacgcggagcatagactgcggg

SEQ ID NO: 229 - DNA, 23 bp, Artificial Sequence
  Description of Artificial Sequence: Synthetic oligonucleotide
gaacgcgaggcatagactgcggg

SEQ ID NO: 230 - DNA, 23 bp, Artificial Sequence
  Description of Artificial Sequence: Synthetic oligonucleotide
gaatgtaaagcatagactgcagg

SEQ ID NO: 231 - DNA, 23 bp, Artificial Sequence
  Description of Artificial Sequence: Synthetic oligonucleotide
gaacgtaaagcatagactgtggg

SEQ ID NO: 232 - DNA, 23 bp, Artificial Sequence
  Description of Artificial Sequence: Synthetic oligonucleotide
gaacacaaagcatagaatgcggg

SEQ ID NO: 233 - DNA, 23 bp, Artificial Sequence
  Description of Artificial Sequence: Synthetic oligonucleotide
gaacaggaagcatagactgcggg

SEQ ID NO: 234 - DNA, 23 bp, Artificial Sequence
  Description of Artificial Sequence: Synthetic oligonucleotide
gaagacaaagcatagactgcggg

SEQ ID NO: 235 - DNA, 23 bp, Artificial Sequence
  Description of Artificial Sequence: Synthetic oligonucleotide
gaacacaaagcatagactgaggg

SEQ ID NO: 236 - DNA, 23 bp, Artificial Sequence
  Description of Artificial Sequence: Synthetic oligonucleotide
gaacgtgaagtatagactgcggg

SEQ ID NO: 237 - DNA, 23 bp, Artificial Sequence
  Description of Artificial Sequence: Synthetic oligonucleotide
gaacgtgaagcatagactgcgag

SEQ ID NO: 238 - DNA, 23 bp, Artificial Sequence
  Description of Artificial Sequence: Synthetic oligonucleotide
gaatgcaaaacatagactgcggg

SEQ ID NO: 239 - DNA, 23 bp, Artificial Sequence
  Description of Artificial Sequence: Synthetic oligonucleotide
gagcgtaaagcatagactgcggg

SEQ ID NO: 240 - DNA, 23 bp, Artificial Sequence
  Description of Artificial Sequence: Synthetic oligonucleotide
gaacagaaagcatagactgcggg

SEQ ID NO: 241 - DNA, 23 bp, Artificial Sequence
  Description of Artificial Sequence: Synthetic oligonucleotide
ggatgtgaagcatagactgcggg

SEQ ID NO: 242 - DNA, 23 bp, Artificial Sequence
  Description of Artificial Sequence: Synthetic oligonucleotide
gagcgcaaggcatagactgcggg

SEQ ID NO: 243 - DNA, 23 bp, Artificial Sequence
  Description of Artificial Sequence: Synthetic oligonucleotide
gaatgcggagcatagactgcggg

SEQ ID NO: 244 - DNA, 23 bp, Artificial Sequence
  Description of Artificial Sequence: Synthetic oligonucleotide
gaatgtgaggtatagactgcggg

SEQ ID NO: 245 - DNA, 23 bp, Artificial Sequence
  Description of Artificial Sequence: Synthetic oligonucleotide
gaacgcgaagcatagactgcgga

SEQ ID NO: 246 - DNA, 23 bp, Artificial Sequence
  Description of Artificial Sequence: Synthetic oligonucleotide
gaatgtaaagcatagactgcgga

SEQ ID NO: 247 - DNA, 23 bp, Artificial Sequence
  Description of Artificial Sequence: Synthetic oligonucleotide
gaatgtaaagcatggactgcggg

SEQ ID NO: 248 - DNA, 23 bp, Artificial Sequence
  Description of Artificial Sequence: Synthetic oligonucleotide
gaacacaaagcatagactacggg

SEQ ID NO: 249 - DNA, 23 bp, Artificial Sequence
  Description of Artificial Sequence: Synthetic oligonucleotide
gaagggaaagcatagactgcggg

SEQ ID NO: 250 - DNA, 23 bp, Artificial Sequence
  Description of Artificial Sequence: Synthetic oligonucleotide
gaatataaagtatagactgcggg

SEQ ID NO: 251 - DNA, 23 bp, Artificial Sequence
  Description of Artificial Sequence: Synthetic oligonucleotide
gaatgagaagcatagactgcggg

SEQ ID NO: 252 - DNA, 23 bp, Artificial Sequence
  Description of Artificial Sequence: Synthetic oligonucleotide
gaatgtgaagcgtagactgcggg

SEQ ID NO: 253 - DNA, 23 bp, Artificial Sequence
  Description of Artificial Sequence: Synthetic oligonucleotide
gaatgtaaagcatagactgcgag

SEQ ID NO: 254 - DNA, 23 bp, Artificial Sequence
  Description of Artificial Sequence: Synthetic oligonucleotide
aaacgcgaagcatagactgcggg

SEQ ID NO: 255 - DNA, 23 bp, Artificial Sequence
  Description of Artificial Sequence: Synthetic oligonucleotide
gaatgcaaagcatagactgcagg

SEQ ID NO: 256 - DNA, 23 bp, Artificial Sequence
  Description of Artificial Sequence: Synthetic oligonucleotide
gaacgtaaggcatagactgcggg

SEQ ID NO: 257 - DNA, 23 bp, Artificial Sequence
  Description of Artificial Sequence: Synthetic oligonucleotide
ggacacaaagcatagactgcggg

SEQ ID NO: 258 - DNA, 23 bp, Artificial Sequence
  Description of Artificial Sequence: Synthetic oligonucleotide
aaatgtaaagcatagactgcggg

SEQ ID NO: 259 - DNA, 23 bp, Artificial Sequence
  Description of Artificial Sequence: Synthetic oligonucleotide
gtaagtaaagcatagactgcggg

SEQ ID NO: 260 - DNA, 23 bp, Artificial Sequence
  Description of Artificial Sequence: Synthetic oligonucleotide
gaactcgaagcatagactgcggg

SEQ ID NO: 261 - DNA, 23 bp, Artificial Sequence
  Description of Artificial Sequence: Synthetic oligonucleotide
gaaggcagagcatagactgcggg

SEQ ID NO: 262 - DNA, 23 bp, Artificial Sequence
  Description of Artificial Sequence: Synthetic oligonucleotide
gaaggcaaagcatagactgtggg

SEQ ID NO: 263 - DNA, 23 bp, Artificial Sequence
  Description of Artificial Sequence: Synthetic oligonucleotide
aaacacaaagcatagactgcggg

SEQ ID NO: 264 - DNA, 23 bp, Artificial Sequence
  Description of Artificial Sequence: Synthetic oligonucleotide
gaacacaaagaatagactgcggg

SEQ ID NO: 265 - DNA, 23 bp, Artificial Sequence
  Description of Artificial Sequence: Synthetic oligonucleotide
gaatgtaaagtgtagactgcggg

SEQ ID NO: 266 - DNA, 23 bp, Artificial Sequence
  Description of Artificial Sequence: Synthetic oligonucleotide
gaatgtaaagcatagactgcgtg

SEQ ID NO: 267 - DNA, 23 bp, Artificial Sequence
  Description of Artificial Sequence: Synthetic oligonucleotide
gaatgtaaaggatagactgcggg

SEQ ID NO: 268 - DNA, 23 bp, Artificial Sequence
  Description of Artificial Sequence: Synthetic oligonucleotide
gaacacaaagcatagactgcgtg

SEQ ID NO: 269 - DNA, 23 bp, Artificial Sequence
  Description of Artificial Sequence: Synthetic oligonucleotide
gaatgcgaggcatagactgcggg

SEQ ID NO: 270 - DNA, 23 bp, Artificial Sequence
  Description of Artificial Sequence: Synthetic oligonucleotide
gaatggaaagtatagactgcggg

SEQ ID NO: 271 - DNA, 23 bp, Artificial Sequence
  Description of Artificial Sequence: Synthetic oligonucleotide
gaatgtaaagcatagactacggg

SEQ ID NO: 272 - DNA, 23 bp, Artificial Sequence
  Description of Artificial Sequence: Synthetic oligonucleotide
ggatgtaaagcatagactgcggg

SEQ ID NO: 273 - DNA, 23 bp, Artificial Sequence
  Description of Artificial Sequence: Synthetic oligonucleotide
gaatgtaaagcatagattgcggg

SEQ ID NO: 274 - DNA, 23 bp, Artificial Sequence
  Description of Artificial Sequence: Synthetic oligonucleotide
gaaaaaaaagtatagactgcggg

SEQ ID NO: 275 - DNA, 23 bp, Artificial Sequence
  Description of Artificial Sequence: Synthetic oligonucleotide
gagtgtggagcatagactgcggg

SEQ ID NO: 276 - DNA, 23 bp, Artificial Sequence
  Description of Artificial Sequence: Synthetic oligonucleotide
gaacacaaagcataaactgcggg

SEQ ID NO: 277 - DNA, 23 bp, Artificial Sequence
  Description of Artificial Sequence: Synthetic oligonucleotide
gaatgtgaagcatagattgcggg

SEQ ID NO: 278 - DNA, 23 bp, Artificial Sequence
  Description of Artificial Sequence: Synthetic oligonucleotide
gaacacgaagcatagactgcggg

SEQ ID NO: 279 - DNA, 23 bp, Artificial Sequence
  Description of Artificial Sequence: Synthetic oligonucleotide
gaagataaagcatagactgcggg

SEQ ID NO: 280 - DNA, 23 bp, Artificial Sequence
  Description of Artificial Sequence: Synthetic oligonucleotide
gaatgtaaagcatagactgaggg

SEQ ID NO: 281 - DNA, 23 bp, Artificial Sequence
  Description of Artificial Sequence: Synthetic oligonucleotide
gaatgtgaagcatagactgcgga

SEQ ID NO: 282 - DNA, 23 bp, Artificial Sequence
  Description of Artificial Sequence: Synthetic oligonucleotide
gaatgtaaaacatagactgcggg

SEQ ID NO: 283 - DNA, 23 bp, Artificial Sequence
  Description of Artificial Sequence: Synthetic oligonucleotide
gaatgtgaagtgtagactgcggg

SEQ ID NO: 284 - DNA, 23 bp, Artificial Sequence
  Description of Artificial Sequence: Synthetic oligonucleotide
taatgtaaagcatagactgcggg

SEQ ID NO: 285 - DNA, 23 bp, Artificial Sequence
  Description of Artificial Sequence: Synthetic oligonucleotide
gaacgcaaagcatagactgcgga

SEQ ID NO: 286 - DNA, 23 bp, Artificial Sequence
  Description of Artificial Sequence: Synthetic oligonucleotide
gaacacaaaacatagactgcggg

SEQ ID NO: 287 - DNA, 23 bp, Artificial Sequence
  Description of Artificial Sequence: Synthetic oligonucleotide
gaatatgaagcatagactgcggg

SEQ ID NO: 288 - DNA, 23 bp, Artificial Sequence
  Description of Artificial Sequence: Synthetic oligonucleotide
gaatgcaaagcatagactgcgga

SEQ ID NO: 289 - DNA, 23 bp, Artificial Sequence
  Description of Artificial Sequence: Synthetic oligonucleotide
gaatgcaaagcatagactgctgg

SEQ ID NO: 290 - DNA, 23 bp, Artificial Sequence
  Description of Artificial Sequence: Synthetic oligonucleotide
gaacgcaaagcataaactgcggg

SEQ ID NO: 291 - DNA, 23 bp, Artificial Sequence
  Description of Artificial Sequence: Synthetic oligonucleotide
gaacgcaaaggatagactgcggg

SEQ ID NO: 292 - DNA, 23 bp, Artificial Sequence
  Description of Artificial Sequence: Synthetic oligonucleotide
gaacgcaaaacatagactgcggg

SEQ ID NO: 293 - DNA, 23 bp, Artificial Sequence
  Description of Artificial Sequence: Synthetic oligonucleotide
gaacacaaggcatagactgcggg

SEQ ID NO: 294 - DNA, 23 bp, Artificial Sequence
  Description of Artificial Sequence: Synthetic oligonucleotide
gaatgtaaagcatagactgctgg

SEQ ID NO: 295 - DNA, 23 bp, Artificial Sequence
  Description of Artificial Sequence: Synthetic oligonucleotide
gaacgtcaagcatagactgcggg

SEQ ID NO: 296 - DNA, 23 bp, Artificial Sequence
  Description of Artificial Sequence: Synthetic oligonucleotide
gaacgcgaagcatagactacggg

SEQ ID NO: 297 - DNA, 23 bp, Artificial Sequence
  Description of Artificial Sequence: Synthetic oligonucleotide
gaatgtaaggtgtagactgcggg

SEQ ID NO: 298 - DNA, 23 bp, Artificial Sequence
  Description of Artificial Sequence: Synthetic oligonucleotide
gaatgtgaagcatagactgaggg

SEQ ID NO: 299 - DNA, 23 bp, Artificial Sequence
  Description of Artificial Sequence: Synthetic oligonucleotide
gaatgtgaagcatagactgcagg

SEQ ID NO: 300 - DNA, 23 bp, Artificial Sequence
  Description of Artificial Sequence: Synthetic oligonucleotide
gaacacaaagcaaagactgcggg

SEQ ID NO: 301 - DNA, 23 bp, Artificial Sequence
  Description of Artificial Sequence: Synthetic oligonucleotide
gaacacaaatcatagactgcggg

SEQ ID NO: 302 - DNA, 23 bp, Artificial Sequence
  Description of Artificial Sequence: Synthetic oligonucleotide
gaatgtgaagcatagactgtggg

SEQ ID NO: 303 - DNA, 23 bp, Artificial Sequence
  Description of Artificial Sequence: Synthetic oligonucleotide
caaagcaaagcatagactgcggg

SEQ ID NO: 304 - DNA, 23 bp, Artificial Sequence
  Description of Artificial Sequence: Synthetic oligonucleotide
gagtgtgaagtatagactgcggg

SEQ ID NO: 305 - DNA, 23 bp, Artificial Sequence
  Description of Artificial Sequence: Synthetic oligonucleotide
gaaatcaaagcatagactgcggg

SEQ ID NO: 306 - DNA, 23 bp, Artificial Sequence
  Description of Artificial Sequence: Synthetic oligonucleotide
gagtgcgaagcatagactgcggg

SEQ ID NO: 307 - DNA, 23 bp, Artificial Sequence
  Description of Artificial Sequence: Synthetic oligonucleotide
gaaagcaaagcatagactgtggg

SEQ ID NO: 308 - DNA, 23 bp, Artificial Sequence
  Description of Artificial Sequence: Synthetic oligonucleotide
ggatgtgaagtatagactgcggg

SEQ ID NO: 309 - DNA, 23 bp, Artificial Sequence
  Description of Artificial Sequence: Synthetic oligonucleotide
gaattggaagcatagactgcggg

SEQ ID NO: 310 - DNA, 23 bp, Artificial Sequence
  Description of Artificial Sequence: Synthetic oligonucleotide
gaaataaaagcatagactgcggg

SEQ ID NO: 311 - DNA, 23 bp, Artificial Sequence
  Description of Artificial Sequence: Synthetic oligonucleotide
gaatgcaaagcatagactgaggg

SEQ ID NO: 312 - DNA, 23 bp, Artificial Sequence
  Description of Artificial Sequence: Synthetic oligonucleotide
gaatgcaaagcatagactgcgag

SEQ ID NO: 313 - DNA, 23 bp, Artificial Sequence
  Description of Artificial Sequence: Synthetic oligonucleotide
gaacctaaagcatagactgcggg

SEQ ID NO: 314 - DNA, 23 bp, Artificial Sequence
  Description of Artificial Sequence: Synthetic oligonucleotide
gaatgcaaagcaaagactgcggg

SEQ ID NO: 315 - DNA, 23 bp, Artificial Sequence
  Description of Artificial Sequence: Synthetic oligonucleotide
gaacgcaaagcatagactacggg

SEQ ID NO: 316 - DNA, 23 bp, Artificial Sequence
  Description of Artificial Sequence: Synthetic oligonucleotide
ggacgcaaagcatagactgcggg

SEQ ID NO: 317 - DNA, 23 bp, Artificial Sequence
  Description of Artificial Sequence: Synthetic oligonucleotide
gaatgcaaagcatagattgcggg

SEQ ID NO: 318 - DNA, 23 bp, Artificial Sequence
  Description of Artificial Sequence: Synthetic oligonucleotide
gaatgcaaaggatagactgcggg

SEQ ID NO: 319 - DNA, 23 bp, Artificial Sequence
  Description of Artificial Sequence: Synthetic oligonucleotide
gggcgcaaagcatagactgcggg

SEQ ID NO: 320 - DNA, 23 bp, Artificial Sequence
  Description of Artificial Sequence: Synthetic oligonucleotide
gaaaagaaagcatagactgcggg

SEQ ID NO: 321 - DNA, 23 bp, Artificial Sequence
  Description of Artificial Sequence: Synthetic oligonucleotide
gaaagaaaagaatagactgcggg

SEQ ID NO: 322 - DNA, 23 bp, Artificial Sequence
  Description of Artificial Sequence: Synthetic oligonucleotide
gaatgcgaagtatagactgcggg

SEQ ID NO: 323 - DNA, 23 bp, Artificial Sequence
  Description of Artificial Sequence: Synthetic oligonucleotide
gaatggaaagcatagactgtggg

SEQ ID NO: 324 - DNA, 23 bp, Artificial Sequence
  Description of Artificial Sequence: Synthetic oligonucleotide
gaatgtaaagaatagactgcggg

SEQ ID NO: 325 - DNA, 23 bp, Artificial Sequence
  Description of Artificial Sequence: Synthetic oligonucleotide
gaatgtaaagcataaactgcggg

SEQ ID NO: 326 - DNA, 23 bp, Artificial Sequence
  Description of Artificial Sequence: Synthetic oligonucleotide
gaacacaaagcgtagactgcggg

SEQ ID NO: 327 - DNA, 23 bp, Artificial Sequence
  Description of Artificial Sequence: Synthetic oligonucleotide
gaatgtaaagcataggctgcggg

SEQ ID NO: 328 - DNA, 23 bp, Artificial Sequence
  Description of Artificial Sequence: Synthetic oligonucleotide
gaacacaaagcatagactgctgg

SEQ ID NO: 329 - DNA, 23 bp, Artificial Sequence
  Description of Artificial Sequence: Synthetic oligonucleotide
gaacgcaaagcatagactgcgtg

SEQ ID NO: 330 - DNA, 23 bp, Artificial Sequence
  Description of Artificial Sequence: Synthetic oligonucleotide
gagcacaaagcatagactgcggg

SEQ ID NO: 331 - DNA, 23 bp, Artificial Sequence
  Description of Artificial Sequence: Synthetic oligonucleotide
gaatttgaagcatagactgcggg

SEQ ID NO: 332 - DNA, 23 bp, Artificial Sequence
  Description of Artificial Sequence: Synthetic oligonucleotide
gaacacaaagcacagactgcggg

SEQ ID NO: 333 - DNA, 23 bp, Artificial Sequence
  Description of Artificial Sequence: Synthetic oligonucleotide
gaatgtgaagcatagactgcgag

SEQ ID NO: 334 - DNA, 23 bp, Artificial Sequence
  Description of Artificial Sequence: Synthetic oligonucleotide
gaacacaaagcatagaccgcggg

SEQ ID NO: 335 - DNA, 23 bp, Artificial Sequence
  Description of Artificial Sequence: Synthetic oligonucleotide
aaaagcaaagcatagactgcggg

SEQ ID NO: 336 - DNA, 23 bp, Artificial Sequence
  Description of Artificial Sequence: Synthetic oligonucleotide
gaacgctaagcatagactgcggg

SEQ ID NO: 337 - DNA, 23 bp, Artificial Sequence
  Description of Artificial Sequence: Synthetic oligonucleotide
gaacgtgaagcatagattgcggg

SEQ ID NO: 338 - DNA, 23 bp, Artificial Sequence
  Description of Artificial Sequence: Synthetic oligonucleotide
gaacgcgaagcatagactgtggg

SEQ ID NO: 339 - DNA, 23 bp, Artificial Sequence
  Description of Artificial Sequence: Synthetic oligonucleotide
gaacgcaaagcatagattgcggg

SEQ ID NO: 340 - DNA, 23 bp, Artificial Sequence
  Description of Artificial Sequence: Synthetic oligonucleotide
gaacgtgaagcatggactgcggg

SEQ ID NO: 341 - DNA, 23 bp, Artificial Sequence
  Description of Artificial Sequence: Synthetic oligonucleotide
gaaaacaaagtatagactgcggg

SEQ ID NO: 342 - DNA, 23 bp, Artificial Sequence
  Description of Artificial Sequence: Synthetic oligonucleotide
gaatgcaaagcatagactgcgtg

SEQ ID NO: 343 - DNA, 23 bp, Artificial Sequence
  Description of Artificial Sequence: Synthetic oligonucleotide
gagtggaaagcatagactgcggg

SEQ ID NO: 344 - DNA, 23 bp, Artificial Sequence
  Description of Artificial Sequence: Synthetic oligonucleotide
gaatgcaaagcataggctgcggg

SEQ ID NO: 345 - DNA, 23 bp, Artificial Sequence
  Description of Artificial Sequence: Synthetic oligonucleotide
gaatgcaaagcgtagactgcggg

SEQ ID NO: 346 - DNA, 23 bp, Artificial Sequence
  Description of Artificial Sequence: Synthetic oligonucleotide
gaacgcaaagcacagactgcggg

SEQ ID NO: 347 - DNA, 23 bp, Artificial Sequence
  Description of Artificial Sequence: Synthetic oligonucleotide
gaacgcaaagaatagactgcggg

SEQ ID NO: 348 - DNA, 23 bp, Artificial Sequence
  Description of Artificial Sequence: Synthetic oligonucleotide
gaatgtaaagcgtagactgcggg

SEQ ID NO: 349 - DNA, 23 bp, Artificial Sequence
  Description of Artificial Sequence: Synthetic oligonucleotide
gaatgcgaagcatagactgcgag

SEQ ID NO: 350 - DNA, 23 bp, Artificial Sequence
  Description of Artificial Sequence: Synthetic oligonucleotide
gaacacatagcatagactgcggg

SEQ ID NO: 351 - DNA, 23 bp, Artificial Sequence
  Description of Artificial Sequence: Synthetic oligonucleotide
gaatgcaaagaatagactgcggg

SEQ ID NO: 352 - DNA, 23 bp, Artificial Sequence
  Description of Artificial Sequence: Synthetic oligonucleotide
gaaagcaaagtatagactgcggg

SEQ ID NO: 353 - DNA, 23 bp, Artificial Sequence
  Description of Artificial Sequence: Synthetic oligonucleotide
gaacacagagcatagactgcggg

SEQ ID NO: 354 - DNA, 23 bp, Artificial Sequence
  Description of Artificial Sequence: Synthetic oligonucleotide
gaacgtagagcatagactgcggg

SEQ ID NO: 355 - DNA, 23 bp, Artificial Sequence
  Description of Artificial Sequence: Synthetic oligonucleotide
gaatgtaaagcaaagactgcggg

SEQ ID NO: 356 - DNA, 23 bp, Artificial Sequence
  Description of Artificial Sequence: Synthetic oligonucleotide
gaatgtaaagcatagacttcggg

SEQ ID NO: 357 - DNA, 23 bp, Artificial Sequence
  Description of Artificial Sequence: Synthetic oligonucleotide
gaatgtaaagcatagaatgcggg

SEQ ID NO: 358 - DNA, 23 bp, Artificial Sequence
  Description of Artificial Sequence: Synthetic oligonucleotide
gaacacaaagcatagacttcggg

SEQ ID NO: 359 - DNA, 23 bp, Artificial Sequence
  Description of Artificial Sequence: Synthetic oligonucleotide
gaatgtggagtatagactgcggg

SEQ ID NO: 360 - DNA, 23 bp, Artificial Sequence
  Description of Artificial Sequence: Synthetic oligonucleotide
gaacacaaagcatatactgcggg

SEQ ID NO: 361 - DNA, 23 bp, Artificial Sequence
  Description of Artificial Sequence: Synthetic oligonucleotide
gaatgcaaagcacagactgcggg

SEQ ID NO: 362 - DNA, 23 bp, Artificial Sequence
  Description of Artificial Sequence: Synthetic oligonucleotide
gaatgcaaagcatagacttcggg

SEQ ID NO: 363 - DNA, 23 bp, Artificial Sequence
  Description of Artificial Sequence: Synthetic oligonucleotide
gaataggaagcatagactgcggg

SEQ ID NO: 364 - DNA, 23 bp, Artificial Sequence
  Description of Artificial Sequence: Synthetic oligonucleotide
gaatgtgaagcatagacttcggg

SEQ ID NO: 365 - DNA, 23 bp, Artificial Sequence
  Description of Artificial Sequence: Synthetic oligonucleotide
gaacgcaaagcatagaccgcggg

SEQ ID NO: 366 - DNA, 23 bp, Artificial Sequence
  Description of Artificial Sequence: Synthetic oligonucleotide
gtatgtaaagcatagactgcggg

SEQ ID NO: 367 - DNA, 23 bp, Artificial Sequence
  Description of Artificial Sequence: Synthetic oligonucleotide
gaacgcaaagcatagactgcagg

SEQ ID NO: 368 - DNA, 23 bp, Artificial Sequence
  Description of Artificial Sequence: Synthetic oligonucleotide
gaacacaaagcatagactggggg

SEQ ID NO: 369 - DNA, 23 bp, Artificial Sequence
  Description of Artificial Sequence: Synthetic oligonucleotide
gaacggaaagtatagactgcggg

SEQ ID NO: 370 - DNA, 23 bp, Artificial Sequence
  Description of Artificial Sequence: Synthetic oligonucleotide
gaacgtaaagcatagactgcgga

SEQ ID NO: 371 - DNA, 23 bp, Artificial Sequence
  Description of Artificial Sequence: Synthetic oligonucleotide
gaatacgaagcatagactgcggg

SEQ ID NO: 372 - DNA, 23 bp, Artificial Sequence
  Description of Artificial Sequence: Synthetic oligonucleotide
gaatacaaagtatagactgcggg

SEQ ID NO: 373 - DNA, 23 bp, Artificial Sequence
  Description of Artificial Sequence: Synthetic oligonucleotide
gaatgtgaagcatagactacggg

SEQ ID NO: 374 - DNA, 23 bp, Artificial Sequence
  Description of Artificial Sequence: Synthetic oligonucleotide
gaacgcgaagcatagattgcggg

SEQ ID NO: 375 - DNA, 23 bp, Artificial Sequence
  Description of Artificial Sequence: Synthetic oligonucleotide
gaacgtaaaacatagactgcggg

SEQ ID NO: 376 - DNA, 23 bp, Artificial Sequence
  Description of Artificial Sequence: Synthetic oligonucleotide
gaacgtaaagcatagactgaggg

SEQ ID NO: 377 - DNA, 23 bp, Artificial Sequence
  Description of Artificial Sequence: Synthetic oligonucleotide
gaatgtgaagcatagaccgcggg

SEQ ID NO: 378 - DNA, 23 bp, Artificial Sequence
  Description of Artificial Sequence: Synthetic oligonucleotide
gtacacaaagcatagactgcggg

SEQ ID NO: 379 - DNA, 23 bp, Artificial Sequence
  Description of Artificial Sequence: Synthetic oligonucleotide
gaattcgaagcatagactgcggg

SEQ ID NO: 380 - DNA, 23 bp, Artificial Sequence
  Description of Artificial Sequence: Synthetic oligonucleotide
gaatgtgaagcatagactgctgg

SEQ ID NO: 381 - DNA, 23 bp, Artificial Sequence
  Description of Artificial Sequence: Synthetic oligonucleotide
gaacgcaaagcatagactgctgg

SEQ ID NO: 382 - DNA, 23 bp, Artificial Sequence
  Description of Artificial Sequence: Synthetic oligonucleotide
gaacacaaagcttagactgcggg

SEQ ID NO: 383 - DNA, 23 bp, Artificial Sequence
  Description of Artificial Sequence: Synthetic oligonucleotide
gaatgtgtagcatagactgcggg

SEQ ID NO: 384 - DNA, 23 bp, Artificial Sequence
  Description of Artificial Sequence: Synthetic oligonucleotide
gaacacaaagcatggactgcggg

SEQ ID NO: 385 - DNA, 23 bp, Artificial Sequence
  Description of Artificial Sequence: Synthetic oligonucleotide
aaacgcaaagcatagactgcggg

SEQ ID NO: 386 - DNA, 23 bp, Artificial Sequence
  Description of Artificial Sequence: Synthetic oligonucleotide
gaatgtaaagcatagactgcgcg

SEQ ID NO: 387 - DNA, 23 bp, Artificial Sequence
  Description of Artificial Sequence: Synthetic oligonucleotide
taacgcaaagcatagactgcggg

SEQ ID NO: 388 - DNA, 23 bp, Artificial Sequence
  Description of Artificial Sequence: Synthetic oligonucleotide
gaacgcaaatcatagactgcggg

SEQ ID NO: 389 - DNA, 23 bp, Artificial Sequence
  Description of Artificial Sequence: Synthetic oligonucleotide
gaatgtggagtgtagactgcggg

SEQ ID NO: 390 - DNA, 23 bp, Artificial Sequence
  Description of Artificial Sequence: Synthetic oligonucleotide
gaatgtaaagcttagactgcggg

SEQ ID NO: 391 - DNA, 23 bp, Artificial Sequence
  Description of Artificial Sequence: Synthetic oligonucleotide
gaacgttaagcatagactgcggg

SEQ ID NO: 392 - DNA, 23 bp, Artificial Sequence
  Description of Artificial Sequence: Synthetic oligonucleotide
gaatgtgaagcatggactgcggg

SEQ ID NO: 393 - DNA, 23 bp, Artificial Sequence
  Description of Artificial Sequence: Synthetic oligonucleotide
gaacacaaagcatagacagcggg

SEQ ID NO: 394 - DNA, 23 bp, Artificial Sequence
  Description of Artificial Sequence: Synthetic oligonucleotide
gaatgcaaagcataaactgcggg

SEQ ID NO: 395 - DNA, 23 bp, Artificial Sequence
  Description of Artificial Sequence: Synthetic oligonucleotide
gaatgtatagcatagactgcggg

SEQ ID NO: 396 - DNA, 23 bp, Artificial Sequence
  Description of Artificial Sequence: Synthetic oligonucleotide
gaacttaaagcatagactgcggg

SEQ ID NO: 397 - DNA, 23 bp, Artificial Sequence
  Description of Artificial Sequence: Synthetic oligonucleotide
gaatgtaaatcatagactgcggg

SEQ ID NO: 398 - DNA, 23 bp, Artificial Sequence
  Description of Artificial Sequence: Synthetic oligonucleotide
gaacgtaaagcataaactgcggg

SEQ ID NO: 399 - DNA, 23 bp, Artificial Sequence
  Description of Artificial Sequence: Synthetic oligonucleotide
gaacacaaagcatagactgccgg

SEQ ID NO: 400 - DNA, 23 bp, Artificial Sequence
  Description of Artificial Sequence: Synthetic oligonucleotide
gagtgtaaagcataaactgcggg

SEQ ID NO: 401 - DNA, 23 bp, Artificial Sequence
  Description of Artificial Sequence: Synthetic oligonucleotide
gaatgtgaagaatagactgcggg

SEQ ID NO: 402 - DNA, 23 bp, Artificial Sequence
  Description of Artificial Sequence: Synthetic oligonucleotide
gaacacaaagcataggctgcggg

SEQ ID NO: 403 - DNA, 23 bp, Artificial Sequence
  Description of Artificial Sequence: Synthetic oligonucleotide
gaacgcaaagcttagactgcggg

SEQ ID NO: 404 - DNA, 23 bp, Artificial Sequence
  Description of Artificial Sequence: Synthetic oligonucleotide
gaatgcaaagcatatactgcggg

SEQ ID NO: 405 - DNA, 23 bp, Artificial Sequence
  Description of Artificial Sequence: Synthetic oligonucleotide
gaatataaagtatagactgtggg

SEQ ID NO: 406 - DNA, 23 bp, Artificial Sequence
  Description of Artificial Sequence: Synthetic oligonucleotide
gaacgcaaagcatagactgaggg

SEQ ID NO: 407 - DNA, 23 bp, Artificial Sequence
  Description of Artificial Sequence: Synthetic oligonucleotide
gaatgtgaagcaaagactgcggg

SEQ ID NO: 408 - DNA, 23 bp, Artificial Sequence
  Description of Artificial Sequence: Synthetic oligonucleotide
gaatgcaaagcatagtctgcggg

SEQ ID NO: 409 - DNA, 23 bp, Artificial Sequence
  Description of Artificial Sequence: Synthetic oligonucleotide
gaacgtaaagcacagactgcggg

SEQ ID NO: 410 - DNA, 23 bp, Artificial Sequence
  Description of Artificial Sequence: Synthetic oligonucleotide
gaatgtgaagtatagactgcagg

SEQ ID NO: 411 - DNA, 23 bp, Artificial Sequence
  Description of Artificial Sequence: Synthetic oligonucleotide
gaatgtgaagcttagactgcggg

SEQ ID NO: 412 - DNA, 23 bp, Artificial Sequence
  Description of Artificial Sequence: Synthetic oligonucleotide
gaatgtgaagcattgactgcggg

SEQ ID NO: 413 - DNA, 23 bp, Artificial Sequence
  Description of Artificial Sequence: Synthetic oligonucleotide
gaaagtaaagcgtagactgcggg

SEQ ID NO: 414 - DNA, 23 bp, Artificial Sequence
  Description of Artificial Sequence: Synthetic oligonucleotide
gaaagtaaagcatagactgaggg

SEQ ID NO: 415 - DNA, 23 bp, Artificial Sequence
  Description of Artificial Sequence: Synthetic oligonucleotide
gaatgtgaagtatagactgcgag

SEQ ID NO: 416 - DNA, 23 bp, Artificial Sequence
  Description of Artificial Sequence: Synthetic oligonucleotide
gaaagtaatgcatagactgcggg

SEQ ID NO: 417 - DNA, 23 bp, Artificial Sequence
  Description of Artificial Sequence: Synthetic oligonucleotide
gaacaaaaagcatagactgaggg

SEQ ID NO: 418 - DNA, 23 bp, Artificial Sequence
  Description of Artificial Sequence: Synthetic oligonucleotide
gaaagtaaagtgtagactgcggg

SEQ ID NO: 419 - DNA, 23 bp, Artificial Sequence
  Description of Artificial Sequence: Synthetic oligonucleotide
gaatgtgcagcatagactgcggg

SEQ ID NO: 420 - DNA, 23 bp, Artificial Sequence
  Description of Artificial Sequence: Synthetic oligonucleotide
gaatgtgaagcatatactgcggg

SEQ ID NO: 421 - DNA, 23 bp, Artificial Sequence
  Description of Artificial Sequence: Synthetic oligonucleotide
gaaagcaaaggatagactgcggg

SEQ ID NO: 422 - DNA, 23 bp, Artificial Sequence
  Description of Artificial Sequence: Synthetic oligonucleotide
gaatgtggggcatagactgcggg

SEQ ID NO: 423 - DNA, 23 bp, Artificial Sequence
  Description of Artificial Sequence: Synthetic oligonucleotide
gagtgtaaagcattgactgcggg

SEQ ID NO: 424 - DNA, 23 bp, Artificial Sequence
  Description of Artificial Sequence: Synthetic oligonucleotide
gtatgtgaagcatagactgcggg

SEQ ID NO: 425 - DNA, 23 bp, Artificial Sequence
  Description of Artificial Sequence: Synthetic oligonucleotide
aaacgtgaagcatagactgcggg

SEQ ID NO: 426 - DNA, 23 bp, Artificial Sequence
  Description of Artificial Sequence: Synthetic oligonucleotide
aaatgtgaagcatagactgcggg

SEQ ID NO: 427 - DNA, 23 bp, Artificial Sequence
  Description of Artificial Sequence: Synthetic oligonucleotide
gaacgcgtagcatagactgcggg

SEQ ID NO: 428 - DNA, 23 bp, Artificial Sequence
  Description of Artificial Sequence: Synthetic oligonucleotide
ggatggaaagcatagactgcggg

SEQ ID NO: 429 - DNA, 23 bp, Artificial Sequence
  Description of Artificial Sequence: Synthetic oligonucleotide
caatgtgaagcatagactgcggg

SEQ ID NO: 430 - DNA, 23 bp, Artificial Sequence
  Description of Artificial Sequence: Synthetic oligonucleotide
gcacacaaagcatagactgcggg

SEQ ID NO: 431 - DNA, 23 bp, Artificial Sequence
  Description of Artificial Sequence: Synthetic oligonucleotide
gattgtaaagcatagactgcggg

SEQ ID NO: 432 - DNA, 23 bp, Artificial Sequence
  Description of Artificial Sequence: Synthetic oligonucleotide
gattgcaaagcatagactgcggg

SEQ ID NO: 433 - DNA, 23 bp, Artificial Sequence
  Description of Artificial Sequence: Synthetic oligonucleotide
gatcgcaaagcatagactgcggg

SEQ ID NO: 434 - DNA, 23 bp, Artificial Sequence
  Description of Artificial Sequence: Synthetic oligonucleotide
gagtgtggggcatagactgcggg

SEQ ID NO: 435 - DNA, 23 bp, Artificial Sequence
  Description of Artificial Sequence: Synthetic oligonucleotide
gagtgtgggacatagactgcggg

SEQ ID NO: 436 - DNA, 23 bp, Artificial Sequence
  Description of Artificial Sequence: Synthetic oligonucleotide
gaacggaaagcatagactgaggg

SEQ ID NO: 437 - DNA, 23 bp, Artificial Sequence
  Description of Artificial Sequence: Synthetic oligonucleotide
gaacgcgaagcatagactgctgg

SEQ ID NO: 438 - DNA, 23 bp, Artificial Sequence
  Description of Artificial Sequence: Synthetic oligonucleotide
gaacggaaagcatagacttcggg

SEQ ID NO: 439 - DNA, 23 bp, Artificial Sequence
  Description of Artificial Sequence: Synthetic oligonucleotide
gaattaaaagcatagactgcggg

SEQ ID NO: 440 - DNA, 23 bp, Artificial Sequence
  Description of Artificial Sequence: Synthetic oligonucleotide
gaacggaaagcgtagactgcggg

SEQ ID NO: 441 - DNA, 23 bp, Artificial Sequence
  Description of Artificial Sequence: Synthetic oligonucleotide
gaaagcaaaacatagactgcggg

SEQ ID NO: 442 - DNA, 23 bp, Artificial Sequence
  Description of Artificial Sequence: Synthetic oligonucleotide
gagtgaaaagcatagactgcggg

SEQ ID NO: 443 - DNA, 23 bp, Artificial Sequence
  Description of Artificial Sequence: Synthetic oligonucleotide
gagtataaagcatagactgcggg

SEQ ID NO: 444 - DNA, 23 bp, Artificial Sequence
  Description of Artificial Sequence: Synthetic oligonucleotide
gaaagcaaaccatagactgcggg

SEQ ID NO: 445 - DNA, 23 bp, Artificial Sequence
  Description of Artificial Sequence: Synthetic oligonucleotide
gagcgggaagcatagactgcggg

SEQ ID NO: 446 - DNA, 23 bp, Artificial Sequence
  Description of Artificial Sequence: Synthetic oligonucleotide
gagcgcaaagcatagactgaggg

SEQ ID NO: 447 - DNA, 23 bp, Artificial Sequence
  Description of Artificial Sequence: Synthetic oligonucleotide
gagcgcaaagcataaactgcggg

SEQ ID NO: 448 - DNA, 23 bp, Artificial Sequence
  Description of Artificial Sequence: Synthetic oligonucleotide
gaacgcgaagcatagactgcgtg

SEQ ID NO: 449 - DNA, 23 bp, Artificial Sequence
  Description of Artificial Sequence: Synthetic oligonucleotide
gaaagcagagcatagactgcggg

SEQ ID NO: 450 - DNA, 23 bp, Artificial Sequence
  Description of Artificial Sequence: Synthetic oligonucleotide
gaacgtaaagaatagactgcggg

SEQ ID NO: 451 - DNA, 23 bp, Artificial Sequence
  Description of Artificial Sequence: Synthetic oligonucleotide
gaaagctaagcatagactgcggg

SEQ ID NO: 452 - DNA, 23 bp, Artificial Sequence
  Description of Artificial Sequence: Synthetic oligonucleotide
gaattgaaagcatagactgaggg

SEQ ID NO: 453 - DNA, 23 bp, Artificial Sequence
  Description of Artificial Sequence: Synthetic oligonucleotide
gaaagtaaagcatagactccggg

SEQ ID NO: 454 - DNA, 23 bp, Artificial Sequence
  Description of Artificial Sequence: Synthetic oligonucleotide
gaatgtgaagcatagactgcgtg

SEQ ID NO: 455 - DNA, 23 bp, Artificial Sequence
  Description of Artificial Sequence: Synthetic oligonucleotide
gaatgtaaagcattgactgcggg

SEQ ID NO: 456 - DNA, 23 bp, Artificial Sequence
  Description of Artificial Sequence: Synthetic oligonucleotide
gaacgcgaagcatagactgcagg

SEQ ID NO: 457 - DNA, 23 bp, Artificial Sequence
  Description of Artificial Sequence: Synthetic oligonucleotide
gaacgcaaagcatacactgcggg

SEQ ID NO: 458 - DNA, 23 bp, Artificial Sequence
  Description of Artificial Sequence: Synthetic oligonucleotide
gaacttgaagcatagactgcggg

SEQ ID NO: 459 - DNA, 23 bp, Artificial Sequence
  Description of Artificial Sequence: Synthetic oligonucleotide
gaatgcaaagcatagaatgcggg

SEQ ID NO: 460 - DNA, 23 bp, Artificial Sequence
  Description of Artificial Sequence: Synthetic oligonucleotide
gaatgcaaagcatagactacggg

SEQ ID NO: 461 - DNA, 23 bp, Artificial Sequence
  Description of Artificial Sequence: Synthetic oligonucleotide
gaacgcaaagcatagaatgcggg

SEQ ID NO: 462 - DNA, 23 bp, Artificial Sequence
  Description of Artificial Sequence: Synthetic oligonucleotide
gaactgaaagcatagactgcggg

SEQ ID NO: 463 - DNA, 23 bp, Artificial Sequence
  Description of Artificial Sequence: Synthetic oligonucleotide
gaactcgaggcatagactgcggg

SEQ ID NO: 464 - DNA, 23 bp, Artificial Sequence
  Description of Artificial Sequence: Synthetic oligonucleotide
gaacgcaaagcatggactgcggg

SEQ ID NO: 465 - DNA, 23 bp, Artificial Sequence
  Description of Artificial Sequence: Synthetic oligonucleotide
gaatgaaaagtatagactgcggg

SEQ ID NO: 466 - DNA, 23 bp, Artificial Sequence
  Description of Artificial Sequence: Synthetic oligonucleotide
gaatgcaaagcttagactgcggg

SEQ ID NO: 467 - DNA, 23 bp, Artificial Sequence
  Description of Artificial Sequence: Synthetic oligonucleotide
gaacgtgaggcatagactgcggg

SEQ ID NO: 468 - DNA, 23 bp, Artificial Sequence
  Description of Artificial Sequence: Synthetic oligonucleotide
gaatgcaaatcatagactgcggg

SEQ ID NO: 469 - DNA, 23 bp, Artificial Sequence
  Description of Artificial Sequence: Synthetic oligonucleotide
gaatgcaaggaatagactgcggg

SEQ ID NO: 470 - DNA, 23 bp, Artificial Sequence
  Description of Artificial Sequence: Synthetic oligonucleotide
gaacgtgaagcgtagactgcggg

SEQ ID NO: 471 - DNA, 23 bp, Artificial Sequence
  Description of Artificial Sequence: Synthetic oligonucleotide
gaatgcgaagcatagactgtggg

SEQ ID NO: 472 - DNA, 23 bp, Artificial Sequence
  Description of Artificial Sequence: Synthetic oligonucleotide
gaacgcaaagcatagacagcggg

SEQ ID NO: 473 - DNA, 23 bp, Artificial Sequence
  Description of Artificial Sequence: Synthetic oligonucleotide
gaacgcaaagcatatactgcggg

SEQ ID NO: 474 - DNA, 23 bp, Artificial Sequence
  Description of Artificial Sequence: Synthetic oligonucleotide
gaacgtaaagcatagactgcgtg

SEQ ID NO: 475 - DNA, 23 bp, Artificial Sequence
  Description of Artificial Sequence: Synthetic oligonucleotide
gaacgcaaagcataggctgcggg

SEQ ID NO: 476 - DNA, 23 bp, Artificial Sequence
  Description of Artificial Sequence: Synthetic oligonucleotide
gaaggcaaagtatagactgcggg

SEQ ID NO: 477 - DNA, 23 bp, Artificial Sequence
  Description of Artificial Sequence: Synthetic oligonucleotide
gaacgcaaagcatagactggggg

SEQ ID NO: 478 - DNA, 23 bp, Artificial Sequence
  Description of Artificial Sequence: Synthetic oligonucleotide
gaaggaaaagcatagactgcggg

SEQ ID NO: 479 - DNA, 23 bp, Artificial Sequence
  Description of Artificial Sequence: Synthetic oligonucleotide
gaacgcaaagcatagactgcggt

SEQ ID NO: 480 - DNA, 23 bp, Artificial Sequence
  Description of Artificial Sequence: Synthetic oligonucleotide
gaaggtaaagcattgactgcggg

SEQ ID NO: 481 - DNA, 23 bp, Artificial Sequence
  Description of Artificial Sequence: Synthetic oligonucleotide
gaaggtaaagtatagactgcggg

SEQ ID NO: 482 - DNA, 23 bp, Artificial Sequence
  Description of Artificial Sequence: Synthetic oligonucleotide
gaagtcaaagcatagactgcggg

SEQ ID NO: 483 - DNA, 23 bp, Artificial Sequence
  Description of Artificial Sequence: Synthetic oligonucleotide
gaatgaaaagcatagactgcagg

SEQ ID NO: 484 - DNA, 23 bp, Artificial Sequence
  Description of Artificial Sequence: Synthetic oligonucleotide
gaacgcaaagcatagactgcgcg

SEQ ID NO: 485 - DNA, 23 bp, Artificial Sequence
  Description of Artificial Sequence: Synthetic oligonucleotide
gaacgcaaagcatagactgccgg

SEQ ID NO: 486 - DNA, 23 bp, Artificial Sequence
  Description of Artificial Sequence: Synthetic oligonucleotide
gaatagaaagtatagactgcggg

SEQ ID NO: 487 - DNA, 23 bp, Artificial Sequence
  Description of Artificial Sequence: Synthetic oligonucleotide
gaagacgaagcatagactgcggg

SEQ ID NO: 488 - DNA, 23 bp, Artificial Sequence
  Description of Artificial Sequence: Synthetic oligonucleotide
gaatccaaagcatagactgcggg

SEQ ID NO: 489 - DNA, 23 bp, Artificial Sequence
  Description of Artificial Sequence: Synthetic oligonucleotide
gaatctgaagcatagactgcggg

SEQ ID NO: 490 - DNA, 23 bp, Artificial Sequence
  Description of Artificial Sequence: Synthetic oligonucleotide
gaacgtgaagcatatactgcggg

SEQ ID NO: 491 - DNA, 23 bp, Artificial Sequence
  Description of Artificial Sequence: Synthetic oligonucleotide
gaacagaaagtatagactgcggg

SEQ ID NO: 492 - DNA, 23 bp, Artificial Sequence
  Description of Artificial Sequence: Synthetic oligonucleotide
gaatggaaagcatagactgcgga

SEQ ID NO: 493 - DNA, 23 bp, Artificial Sequence
  Description of Artificial Sequence: Synthetic oligonucleotide
gaacacaaagcatagactccggg

SEQ ID NO: 494 - DNA, 23 bp, Artificial Sequence
  Description of Artificial Sequence: Synthetic oligonucleotide
gaacgccaagcatagactgcggg

SEQ ID NO: 495 - DNA, 23 bp, Artificial Sequence
  Description of Artificial Sequence: Synthetic oligonucleotide
gaacgcaaagcatagagtgcggg

SEQ ID NO: 496 - DNA, 23 bp, Artificial Sequence
  Description of Artificial Sequence: Synthetic oligonucleotide
gaatgtaaagcctagactgcggg

SEQ ID NO: 497 - DNA, 23 bp, Artificial Sequence
  Description of Artificial Sequence: Synthetic oligonucleotide
gaacacaaagcatagactgcggc

SEQ ID NO: 498 - DNA, 23 bp, Artificial Sequence
  Description of Artificial Sequence: Synthetic oligonucleotide
gaatgtaaagtataaactgcggg

SEQ ID NO: 499 - DNA, 23 bp, Artificial Sequence
  Description of Artificial Sequence: Synthetic oligonucleotide
gaatgtaaagtatagactgcgag

SEQ ID NO: 500 - DNA, 23 bp, Artificial Sequence
  Description of Artificial Sequence: Synthetic oligonucleotide
gaacgtaaatcatagactgcggg

SEQ ID NO: 501 - DNA, 23 bp, Artificial Sequence
  Description of Artificial Sequence: Synthetic oligonucleotide
gaatggaaaggatagactgcggg

SEQ ID NO: 502 - DNA, 23 bp, Artificial Sequence
  Description of Artificial Sequence: Synthetic oligonucleotide
gaacgtaaagcgtagactgcggg

SEQ ID NO: 503 - DNA, 23 bp, Artificial Sequence
  Description of Artificial Sequence: Synthetic oligonucleotide
gaatgtacagcatagactgcggg

SEQ ID NO: 504 - DNA, 23 bp, Artificial Sequence
  Description of Artificial Sequence: Synthetic oligonucleotide
gaacgtaaagcataggctgcggg

SEQ ID NO: 505 - DNA, 23 bp, Artificial Sequence
  Description of Artificial Sequence: Synthetic oligonucleotide
gaatgtgaagcataaactgcggg

SEQ ID NO: 506 - DNA, 23 bp, Artificial Sequence
  Description of Artificial Sequence: Synthetic oligonucleotide
gaacgtaaagcatagacttcggg

SEQ ID NO: 507 - DNA, 23 bp, Artificial Sequence
  Description of Artificial Sequence: Synthetic oligonucleotide
gaacgcgaagcatagactgaggg

SEQ ID NO: 508 - DNA, 23 bp, Artificial Sequence
  Description of Artificial Sequence: Synthetic oligonucleotide
gaatgtaaagcatagtctgcggg

SEQ ID NO: 509 - DNA, 23 bp, Artificial Sequence
  Description of Artificial Sequence: Synthetic oligonucleotide
gaatgtaaagcatagagtgcggg

SEQ ID NO: 510 - DNA, 23 bp, Artificial Sequence
  Description of Artificial Sequence: Synthetic oligonucleotide
gaatgtaaagcatagactggggg

SEQ ID NO: 511 - DNA, 23 bp, Artificial Sequence
  Description of Artificial Sequence: Synthetic oligonucleotide
gaacgtgaagcataaactgcggg

SEQ ID NO: 512 - DNA, 23 bp, Artificial Sequence
  Description of Artificial Sequence: Synthetic oligonucleotide
gaacacaaagcatagtctgcggg

SEQ ID NO: 513 - DNA, 23 bp, Artificial Sequence
  Description of Artificial Sequence: Synthetic oligonucleotide
gaacacaaagcatatattgcggg

SEQ ID NO: 514 - DNA, 23 bp, Artificial Sequence
  Description of Artificial Sequence: Synthetic oligonucleotide
gaacgtgaagcatagactacggg

SEQ ID NO: 515 - DNA, 23 bp, Artificial Sequence
  Description of Artificial Sequence: Synthetic oligonucleotide
gaatgtaaagcatagacggcggg

SEQ ID NO: 516 - DNA, 23 bp, Artificial Sequence
  Description of Artificial Sequence: Synthetic oligonucleotide
gaatgtaaagcatagaccgcggg

SEQ ID NO: 517 - DNA, 23 bp, Artificial Sequence
  Description of Artificial Sequence: Synthetic oligonucleotide
gaacgcaaggcatagactgtggg

SEQ ID NO: 518 - DNA, 23 bp, Artificial Sequence
  Description of Artificial Sequence: Synthetic oligonucleotide
gaatgtaaagcacagactgcggg

SEQ ID NO: 519 - DNA, 23 bp, Artificial Sequence
  Description of Artificial Sequence: Synthetic oligonucleotide
gaatgtaaaccatagactgcggg

SEQ ID NO: 520 - DNA, 23 bp, Artificial Sequence
  Description of Artificial Sequence: Synthetic oligonucleotide
gaacgcgaagcatatactgcggg

SEQ ID NO: 521 - DNA, 23 bp, Artificial Sequence
  Description of Artificial Sequence: Synthetic oligonucleotide
gaatgggaagtatagactgcggg

SEQ ID NO: 522 - DNA, 23 bp, Artificial Sequence
  Description of Artificial Sequence: Synthetic oligonucleotide
gaacgtgaagcatagactgcggt

SEQ ID NO: 523 - DNA, 23 bp, Artificial Sequence
  Description of Artificial Sequence: Synthetic oligonucleotide
gaatgggaagcatagactgcgga

SEQ ID NO: 524 - DNA, 23 bp, Artificial Sequence
  Description of Artificial Sequence: Synthetic oligonucleotide
gaacacaatgcatagactgcggg

SEQ ID NO: 525 - DNA, 23 bp, Artificial Sequence
  Description of Artificial Sequence: Synthetic oligonucleotide
gaacgcgaagcattgactgcggg

SEQ ID NO: 526 - DNA, 23 bp, Artificial Sequence
  Description of Artificial Sequence: Synthetic oligonucleotide
gaacacaaagcatagactgcggg

SEQ ID NO: 527 - DNA, 23 bp, Artificial Sequence
  Description of Artificial Sequence: Synthetic oligonucleotide
gaacgcaaagcatagactgcggg

SEQ ID NO: 528 - DNA, 23 bp, Artificial Sequence
  Description of Artificial Sequence: Synthetic oligonucleotide
gaacgcgaagcatagactgcggg

SEQ ID NO: 529 - DNA, 23 bp, Artificial Sequence
  Description of Artificial Sequence: Synthetic oligonucleotide
gaacacaaagcatagactgcggg

SEQ ID NO: 530 - DNA, 23 bp, Artificial Sequence
  Description of Artificial Sequence: Synthetic oligonucleotide
gaacgcagagcatagactgcggg

SEQ ID NO: 531 - DNA, 23 bp, Artificial Sequence
  Description of Artificial Sequence: Synthetic oligonucleotide
gaacgcaaggcatagactgcggg

SEQ ID NO: 532 - DNA, 23 bp, Artificial Sequence
  Description of Artificial Sequence: Synthetic oligonucleotide
gaacgcggagcatagactgcggg

SEQ ID NO: 533 - DNA, 23 bp, Artificial Sequence
  Description of Artificial Sequence: Synthetic oligonucleotide
gagcgcaaagcatagactgcggg

SEQ ID NO: 534 - DNA, 23 bp, Artificial Sequence
  Description of Artificial Sequence: Synthetic oligonucleotide
gaacgcgaggcatagactgcggg

SEQ ID NO: 535 - DNA, 23 bp, Artificial Sequence
  Description of Artificial Sequence: Synthetic oligonucleotide
gaacggaaagcatagactgcggg

SEQ ID NO: 536 - DNA, 23 bp, Artificial Sequence
  Description of Artificial Sequence: Synthetic oligonucleotide
gagcgcgaagcatagactgcggg

SEQ ID NO: 537 - DNA, 23 bp, Artificial Sequence
  Description of Artificial Sequence: Synthetic oligonucleotide
gaacgcaaagcgtagactgcggg

SEQ ID NO: 538 - DNA, 23 bp, Artificial Sequence
  Description of Artificial Sequence: Synthetic oligonucleotide
gaacgagaagcatagactgcggg

SEQ ID NO: 539 - DNA, 23 bp, Artificial Sequence
  Description of Artificial Sequence: Synthetic oligonucleotide
gaacgaaaagcatagactgcggg

SEQ ID NO: 540 - DNA, 23 bp, Artificial Sequence
  Description of Artificial Sequence: Synthetic oligonucleotide
gaatgcaaagcatagactgcggg

SEQ ID NO: 541 - DNA, 23 bp, Artificial Sequence
  Description of Artificial Sequence: Synthetic oligonucleotide
gagcgcaaggcatagactgcggg

SEQ ID NO: 542 - DNA, 23 bp, Artificial Sequence
  Description of Artificial Sequence: Synthetic oligonucleotide
gaacgcagggcatagactgcggg

SEQ ID NO: 543 - DNA, 23 bp, Artificial Sequence
  Description of Artificial Sequence: Synthetic oligonucleotide
gaacgcggggcatagactgcggg

SEQ ID NO: 544 - DNA, 23 bp, Artificial Sequence
  Description of Artificial Sequence: Synthetic oligonucleotide
gaacgggaagcatagactgcggg

SEQ ID NO: 545 - DNA, 23 bp, Artificial Sequence
  Description of Artificial Sequence: Synthetic oligonucleotide
gaacgccaagcatagactgcggg

SEQ ID NO: 546 - DNA, 23 bp, Artificial Sequence
  Description of Artificial Sequence: Synthetic oligonucleotide
gaacgcgaagcgtagactgcggg

SEQ ID NO: 547 - DNA, 23 bp, Artificial Sequence
  Description of Artificial Sequence: Synthetic oligonucleotide
gaacgcaaagcatagactgtggg

SEQ ID NO: 548 - DNA, 23 bp, Artificial Sequence
  Description of Artificial Sequence: Synthetic oligonucleotide
gagcgcgaggcatagactgcggg

SEQ ID NO: 549 - DNA, 23 bp, Artificial Sequence
  Description of Artificial Sequence: Synthetic oligonucleotide
gaacgcaaagtatagactgcggg

SEQ ID NO: 550 - DNA, 23 bp, Artificial Sequence
  Description of Artificial Sequence: Synthetic oligonucleotide
gaacgcaaagcatagattgcggg

SEQ ID NO: 551 - DNA, 23 bp, Artificial Sequence
  Description of Artificial Sequence: Synthetic oligonucleotide
gaacgcaaagcatagactacggg

SEQ ID NO: 552 - DNA, 23 bp, Artificial Sequence
  Description of Artificial Sequence: Synthetic oligonucleotide
gaacacaaagcatagactgcagg

SEQ ID NO: 553 - DNA, 23 bp, Artificial Sequence
  Description of Artificial Sequence: Synthetic oligonucleotide
gaaagcaaagcatagactgcggg

SEQ ID NO: 554 - DNA, 23 bp, Artificial Sequence
  Description of Artificial Sequence: Synthetic oligonucleotide
gaacgctaagcatagactgcggg

SEQ ID NO: 555 - DNA, 23 bp, Artificial Sequence
  Description of Artificial Sequence: Synthetic oligonucleotide
gaacgtaaagcatagactgcggg

SEQ ID NO: 556 - DNA, 23 bp, Artificial Sequence
  Description of Artificial Sequence: Synthetic oligonucleotide
gaacccaaagcatagactgcggg

SEQ ID NO: 557 - DNA, 23 bp, Artificial Sequence
  Description of Artificial Sequence: Synthetic oligonucleotide
gaacgtgaagcatagactgcggg

SEQ ID NO: 558 - DNA, 23 bp, Artificial Sequence
  Description of Artificial Sequence: Synthetic oligonucleotide
gaacgcgaagcatagactgtggg

SEQ ID NO: 559 - DNA, 23 bp, Artificial Sequence
  Description of Artificial Sequence: Synthetic oligonucleotide
gaacacaaagcatagactgcgag

SEQ ID NO: 560 - DNA, 23 bp, Artificial Sequence
  Description of Artificial Sequence: Synthetic oligonucleotide
gaacgcaaagcatggactgcggg

SEQ ID NO: 561 - DNA, 23 bp, Artificial Sequence
  Description of Artificial Sequence: Synthetic oligonucleotide
gagcgcagagcatagactgcggg

SEQ ID NO: 562 - DNA, 23 bp, Artificial Sequence
  Description of Artificial Sequence: Synthetic oligonucleotide
gaacgcagagcgtagactgcggg

SEQ ID NO: 563 - DNA, 23 bp, Artificial Sequence
  Description of Artificial Sequence: Synthetic oligonucleotide
gaacgcgaagcatagactgcgag

SEQ ID NO: 564 - DNA, 23 bp, Artificial Sequence
  Description of Artificial Sequence: Synthetic oligonucleotide
gaacgcgaagcatagattgcggg

SEQ ID NO: 565 - DNA, 23 bp, Artificial Sequence
  Description of Artificial Sequence: Synthetic oligonucleotide
gaacacaaagcatagactgtggg

SEQ ID NO: 566 - DNA, 23 bp, Artificial Sequence
  Description of Artificial Sequence: Synthetic oligonucleotide
gaacgcaaagcatagactgcgga

SEQ ID NO: 567 - DNA, 23 bp, Artificial Sequence
  Description of Artificial Sequence: Synthetic oligonucleotide
gaacgcaaagcatagactgcgag

SEQ ID NO: 568 - DNA, 23 bp, Artificial Sequence
  Description of Artificial Sequence: Synthetic oligonucleotide
gaacgcgaagcatggactgcggg

SEQ ID NO: 569 - DNA, 23 bp, Artificial Sequence
  Description of Artificial Sequence: Synthetic oligonucleotide
gaacgcaaagcatagactgcagg

SEQ ID NO: 570 - DNA, 23 bp, Artificial Sequence
  Description of Artificial Sequence: Synthetic oligonucleotide
aaacgcgaagcatagactgcggg

SEQ ID NO: 571 - DNA, 23 bp, Artificial Sequence
  Description of Artificial Sequence: Synthetic oligonucleotide
gaacgcaaaacatagactgcggg

SEQ ID NO: 572 - DNA, 23 bp, Artificial Sequence
  Description of Artificial Sequence: Synthetic oligonucleotide
gagcgcagggcatagactgcggg

SEQ ID NO: 573 - DNA, 23 bp, Artificial Sequence
  Description of Artificial Sequence: Synthetic oligonucleotide
aaacgcaaagcatagactgcggg

SEQ ID NO: 574 - DNA, 23 bp, Artificial Sequence
  Description of Artificial Sequence: Synthetic oligonucleotide
gaacgcgaagcatagactgcagg

SEQ ID NO: 575 - DNA, 23 bp, Artificial Sequence
  Description of Artificial Sequence: Synthetic oligonucleotide
gaaggcaaagcatagactgcggg

SEQ ID NO: 576 - DNA, 23 bp, Artificial Sequence
  Description of Artificial Sequence: Synthetic oligonucleotide
gaacgcgaaacatagactgcggg

SEQ ID NO: 577 - DNA, 23 bp, Artificial Sequence
  Description of Artificial Sequence: Synthetic oligonucleotide
gaaagcgaagcatagactgcggg

SEQ ID NO: 578 - DNA, 23 bp, Artificial Sequence
  Description of Artificial Sequence: Synthetic oligonucleotide
gaacgagaggcatagactgcggg

SEQ ID NO: 579 - DNA, 23 bp, Artificial Sequence
  Description of Artificial Sequence: Synthetic oligonucleotide
gaactcaaagcatagactgcggg

SEQ ID NO: 580 - DNA, 23 bp, Artificial Sequence
  Description of Artificial Sequence: Synthetic oligonucleotide
gaacgcaaagcatagactgaggg

SEQ ID NO: 581 - DNA, 23 bp, Artificial Sequence
  Description of Artificial Sequence: Synthetic oligonucleotide
ggacgcaaagcatagactgcggg

SEQ ID NO: 582 - DNA, 23 bp, Artificial Sequence
  Description of Artificial Sequence: Synthetic oligonucleotide
gaacgcaaagcatagactgctgg

SEQ ID NO: 583 - DNA, 23 bp, Artificial Sequence
  Description of Artificial Sequence: Synthetic oligonucleotide
gaacacaaagcatagactgcggt

SEQ ID NO: 584 - DNA, 23 bp, Artificial Sequence
  Description of Artificial Sequence: Synthetic oligonucleotide
gaacgcgaagcataaactgcggg

SEQ ID NO: 585 - DNA, 23 bp, Artificial Sequence
  Description of Artificial Sequence: Synthetic oligonucleotide
gaacgcaaagcataaactgcggg

SEQ ID NO: 586 - DNA, 23 bp, Artificial Sequence
  Description of Artificial Sequence: Synthetic oligonucleotide
gaacgcgaagaatagactgcggg

SEQ ID NO: 587 - DNA, 23 bp, Artificial Sequence
  Description of Artificial Sequence: Synthetic oligonucleotide
gaacgcgaagcatagactgaggg

SEQ ID NO: 588 - DNA, 23 bp, Artificial Sequence
  Description of Artificial Sequence: Synthetic oligonucleotide
gaacgcgaagcatagactacggg

SEQ ID NO: 589 - DNA, 23 bp, Artificial Sequence
  Description of Artificial Sequence: Synthetic oligonucleotide
gaacgcaaagcatagaccgcggg

SEQ ID NO: 590 - DNA, 23 bp, Artificial Sequence
  Description of Artificial Sequence: Synthetic oligonucleotide
aaacacaaagcatagactgcggg

SEQ ID NO: 591 - DNA, 23 bp, Artificial Sequence
  Description of Artificial Sequence: Synthetic oligonucleotide
gagcgcggagcatagactgcggg

SEQ ID NO: 592 - DNA, 23 bp, Artificial Sequence
  Description of Artificial Sequence: Synthetic oligonucleotide
gaatacaaagcatagactgcggg

SEQ ID NO: 593 - DNA, 23 bp, Artificial Sequence
  Description of Artificial Sequence: Synthetic oligonucleotide
gaacgcaaagcaaagactgcggg

SEQ ID NO: 594 - DNA, 23 bp, Artificial Sequence
  Description of Artificial Sequence: Synthetic oligonucleotide
gagcgcggggcatagactgcggg

SEQ ID NO: 595 - DNA, 23 bp, Artificial Sequence
  Description of Artificial Sequence: Synthetic oligonucleotide
gaacgcaaagcatagactgcgtg

SEQ ID NO: 596 - DNA, 23 bp, Artificial Sequence
  Description of Artificial Sequence: Synthetic oligonucleotide
gaacacaaaacatagactgcggg

SEQ ID NO: 597 - DNA, 23 bp, Artificial Sequence
  Description of Artificial Sequence: Synthetic oligonucleotide
gaacgcaaagcatagaatgcggg

SEQ ID NO: 598 - DNA, 23 bp, Artificial Sequence
  Description of Artificial Sequence: Synthetic oligonucleotide
taacgcaaagcatagactgcggg

SEQ ID NO: 599 - DNA, 23 bp, Artificial Sequence
  Description of Artificial Sequence: Synthetic oligonucleotide
gaacgcgaagcatagactgcgga

SEQ ID NO: 600 - DNA, 23 bp, Artificial Sequence
  Description of Artificial Sequence: Synthetic oligonucleotide
gaacgcaaagcatagactgcggt

SEQ ID NO: 601 - DNA, 23 bp, Artificial Sequence
  Description of Artificial Sequence: Synthetic oligonucleotide
gaacacaaagcatagactgaggg

SEQ ID NO: 602 - DNA, 23 bp, Artificial Sequence
  Description of Artificial Sequence: Synthetic oligonucleotide
gaacacaaagcacagactgcggg

SEQ ID NO: 603 - DNA, 23 bp, Artificial Sequence
  Description of Artificial Sequence: Synthetic oligonucleotide
gagcacaaagcatagactgcggg

SEQ ID NO: 604 - DNA, 23 bp, Artificial Sequence
  Description of Artificial Sequence: Synthetic oligonucleotide
gaactcgaagcatagactgcggg

SEQ ID NO: 605 - DNA, 23 bp, Artificial Sequence
  Description of Artificial Sequence: Synthetic oligonucleotide
gaacacgaagcatagactgcggg

SEQ ID NO: 606 - DNA, 23 bp, Artificial Sequence
  Description of Artificial Sequence: Synthetic oligonucleotide
gaacgcaaggcgtagactgcggg

SEQ ID NO: 607 - DNA, 23 bp, Artificial Sequence
  Description of Artificial Sequence: Synthetic oligonucleotide
gggcgcggggcatagactgcggg

SEQ ID NO: 608 - DNA, 23 bp, Artificial Sequence
  Description of Artificial Sequence: Synthetic oligonucleotide
gaacgcaaagaatagactgcggg

SEQ ID NO: 609 - DNA, 23 bp, Artificial Sequence
  Description of Artificial Sequence: Synthetic oligonucleotide
gaacacaaagcatagactacggg

SEQ ID NO: 610 - DNA, 23 bp, Artificial Sequence
  Description of Artificial Sequence: Synthetic oligonucleotide
gaaccggaagcatagactgcggg

SEQ ID NO: 611 - DNA, 23 bp, Artificial Sequence
  Description of Artificial Sequence: Synthetic oligonucleotide
gaatgcgaagcatagactgcggg

SEQ ID NO: 612 - DNA, 23 bp, Artificial Sequence
  Description of Artificial Sequence: Synthetic oligonucleotide
gaacgcgaagcatagactgcgtg

SEQ ID NO: 613 - DNA, 23 bp, Artificial Sequence
  Description of Artificial Sequence: Synthetic oligonucleotide
gaacgcaaagcatagactgcaga

SEQ ID NO: 614 - DNA, 23 bp, Artificial Sequence
  Description of Artificial Sequence: Synthetic oligonucleotide
gagtgcaaggcatagactgcggg

SEQ ID NO: 615 - DNA, 23 bp, Artificial Sequence
  Description of Artificial Sequence: Synthetic oligonucleotide
gaacgcaaagcacagactgcggg

SEQ ID NO: 616 - DNA, 23 bp, Artificial Sequence
  Description of Artificial Sequence: Synthetic oligonucleotide
gaacaaaaagcatagactgcggg

SEQ ID NO: 617 - DNA, 23 bp, Artificial Sequence
  Description of Artificial Sequence: Synthetic oligonucleotide
ggacgcgaagcatagactgcggg

SEQ ID NO: 618 - DNA, 23 bp, Artificial Sequence
  Description of Artificial Sequence: Synthetic oligonucleotide
taacacaaagcatagactgcggg

SEQ ID NO: 619 - DNA, 23 bp, Artificial Sequence
  Description of Artificial Sequence: Synthetic oligonucleotide
gaacgcaaagcatagacttcggg

SEQ ID NO: 620 - DNA, 23 bp, Artificial Sequence
  Description of Artificial Sequence: Synthetic oligonucleotide
gaacgcaaagcatatactgcggg

SEQ ID NO: 621 - DNA, 23 bp, Artificial Sequence
  Description of Artificial Sequence: Synthetic oligonucleotide
gaacacaaagcatagactgcgtg

SEQ ID NO: 622 - DNA, 23 bp, Artificial Sequence
  Description of Artificial Sequence: Synthetic oligonucleotide
gaacacaaagcatagactgctgg

SEQ ID NO: 623 - DNA, 23 bp, Artificial Sequence
  Description of Artificial Sequence: Synthetic oligonucleotide
gaacataaagcatagactgcggg

SEQ ID NO: 624 - DNA, 23 bp, Artificial Sequence
  Description of Artificial Sequence: Synthetic oligonucleotide
gaacgcgaagcatatactgcggg

SEQ ID NO: 625 - DNA, 23 bp, Artificial Sequence
  Description of Artificial Sequence: Synthetic oligonucleotide
gaacgcgaatcatagactgcggg

SEQ ID NO: 626 - DNA, 23 bp, Artificial Sequence
  Description of Artificial Sequence: Synthetic oligonucleotide
gaacgcgaagtatagactgcggg

SEQ ID NO: 627 - DNA, 23 bp, Artificial Sequence
  Description of Artificial Sequence: Synthetic oligonucleotide
gaacgaagagcatagactgcggg

SEQ ID NO: 628 - DNA, 23 bp, Artificial Sequence
  Description of Artificial Sequence: Synthetic oligonucleotide
gaacgcgaagcttagactgcggg

SEQ ID NO: 629 - DNA, 23 bp, Artificial Sequence
  Description of Artificial Sequence: Synthetic oligonucleotide
gatcgcaaagcatagactgcggg

SEQ ID NO: 630 - DNA, 23 bp, Artificial Sequence
  Description of Artificial Sequence: Synthetic oligonucleotide
gaacgcgaagcatagaccgcggg

SEQ ID NO: 631 - DNA, 23 bp, Artificial Sequence
  Description of Artificial Sequence: Synthetic oligonucleotide
ggacacaaagcatagactgcggg

SEQ ID NO: 632 - DNA, 23 bp, Artificial Sequence
  Description of Artificial Sequence: Synthetic oligonucleotide
gaacgcgaagcatagactgctgg

SEQ ID NO: 633 - DNA, 23 bp, Artificial Sequence
  Description of Artificial Sequence: Synthetic oligonucleotide
gaacgcgtagcatagactgcggg

SEQ ID NO: 634 - DNA, 23 bp, Artificial Sequence
  Description of Artificial Sequence: Synthetic oligonucleotide
gaacgcgaagcaaagactgcggg

SEQ ID NO: 635 - DNA, 23 bp, Artificial Sequence
  Description of Artificial Sequence: Synthetic oligonucleotide
gaacgcgatgcatagactgcggg

SEQ ID NO: 636 - DNA, 23 bp, Artificial Sequence
  Description of Artificial Sequence: Synthetic oligonucleotide
taacgcgaagcatagactgcggg

SEQ ID NO: 637 - DNA, 23 bp, Artificial Sequence
  Description of Artificial Sequence: Synthetic oligonucleotide
gaacgcaaagcttagactgcggg

SEQ ID NO: 638 - DNA, 23 bp, Artificial Sequence
  Description of Artificial Sequence: Synthetic oligonucleotide
gaaaacaaagcatagactgcggg

SEQ ID NO: 639 - DNA, 23 bp, Artificial Sequence
  Description of Artificial Sequence: Synthetic oligonucleotide
gaacacaaagcgtagactgcggg

SEQ ID NO: 640 - DNA, 23 bp, Artificial Sequence
  Description of Artificial Sequence: Synthetic oligonucleotide
gaacacagagcatagactgcggg

SEQ ID NO: 641 - DNA, 23 bp, Artificial Sequence
  Description of Artificial Sequence: Synthetic oligonucleotide
gaacacaaggcatagactgcggg

SEQ ID NO: 642 - DNA, 23 bp, Artificial Sequence
  Description of Artificial Sequence: Synthetic oligonucleotide
gaacgcaaagcatagagtgcggg

SEQ ID NO: 643 - DNA, 23 bp, Artificial Sequence
  Description of Artificial Sequence: Synthetic oligonucleotide
gaacgcaaatcatagactgcggg

SEQ ID NO: 644 - DNA, 23 bp, Artificial Sequence
  Description of Artificial Sequence: Synthetic oligonucleotide
gaacgaggagcatagactgcggg

SEQ ID NO: 645 - DNA, 23 bp, Artificial Sequence
  Description of Artificial Sequence: Synthetic oligonucleotide
gaacacaaagcatagaccgcggg

SEQ ID NO: 646 - DNA, 23 bp, Artificial Sequence
  Description of Artificial Sequence: Synthetic oligonucleotide
gaacgcgacgcatagactgcggg

SEQ ID NO: 647 - DNA, 23 bp, Artificial Sequence
  Description of Artificial Sequence: Synthetic oligonucleotide
gaacgcaaagcatagactgcggc

SEQ ID NO: 648 - DNA, 23 bp, Artificial Sequence
  Description of Artificial Sequence: Synthetic oligonucleotide
gaacgcaaagcattgactgcggg

SEQ ID NO: 649 - DNA, 23 bp, Artificial Sequence
  Description of Artificial Sequence: Synthetic oligonucleotide
gaacacaaagcatagacttcggg

SEQ ID NO: 650 - DNA, 23 bp, Artificial Sequence
  Description of Artificial Sequence: Synthetic oligonucleotide
gaacgcaaagcataggctgcggg

SEQ ID NO: 651 - DNA, 23 bp, Artificial Sequence
  Description of Artificial Sequence: Synthetic oligonucleotide
gaacgcgaagcatagagtgcggg

SEQ ID NO: 652 - DNA, 23 bp, Artificial Sequence
  Description of Artificial Sequence: Synthetic oligonucleotide
gaacgcaaagcatagactgccgg

SEQ ID NO: 653 - DNA, 23 bp, Artificial Sequence
  Description of Artificial Sequence: Synthetic oligonucleotide
gagagcgaggcatagactgcggg

SEQ ID NO: 654 - DNA, 23 bp, Artificial Sequence
  Description of Artificial Sequence: Synthetic oligonucleotide
gaacgcgaagcatagacttcggg

SEQ ID NO: 655 - DNA, 23 bp, Artificial Sequence
  Description of Artificial Sequence: Synthetic oligonucleotide
gaacgcaaagcatagactccggg

SEQ ID NO: 656 - DNA, 23 bp, Artificial Sequence
  Description of Artificial Sequence: Synthetic oligonucleotide
gaacgcgaagcacagactgcggg

SEQ ID NO: 657 - DNA, 23 bp, Artificial Sequence
  Description of Artificial Sequence: Synthetic oligonucleotide
gaacacaacgcatagactgcggg

SEQ ID NO: 658 - DNA, 23 bp, Artificial Sequence
  Description of Artificial Sequence: Synthetic oligonucleotide
aaacgcagagcatagactgcggg

SEQ ID NO: 659 - DNA, 23 bp, Artificial Sequence
  Description of Artificial Sequence: Synthetic oligonucleotide
gaacacaaagcaaagactgcggg

SEQ ID NO: 660 - DNA, 23 bp, Artificial Sequence
  Description of Artificial Sequence: Synthetic oligonucleotide
gaacacaaagtatagactgcggg

SEQ ID NO: 661 - DNA, 23 bp, Artificial Sequence
  Description of Artificial Sequence: Synthetic oligonucleotide
gaacgcaacgcatagactgcggg

SEQ ID NO: 662 - DNA, 23 bp, Artificial Sequence
  Description of Artificial Sequence: Synthetic oligonucleotide
gaacgcatagcatagactgcggg

SEQ ID NO: 663 - DNA, 23 bp, Artificial Sequence
  Description of Artificial Sequence: Synthetic oligonucleotide
gaacacaaagaatagactgcggg

SEQ ID NO: 664 - DNA, 23 bp, Artificial Sequence
  Description of Artificial Sequence: Synthetic oligonucleotide
gaacacaaagcatatactgcggg

SEQ ID NO: 665 - DNA, 23 bp, Artificial Sequence
  Description of Artificial Sequence: Synthetic oligonucleotide
gaatgcagagcatagactgcggg

SEQ ID NO: 666 - DNA, 23 bp, Artificial Sequence
  Description of Artificial Sequence: Synthetic oligonucleotide
gaaggcgaagcatagactgcggg

SEQ ID NO: 667 - DNA, 23 bp, Artificial Sequence
  Description of Artificial Sequence: Synthetic oligonucleotide
gaacacaaatcatagactgcggg

SEQ ID NO: 668 - DNA, 23 bp, Artificial Sequence
  Description of Artificial Sequence: Synthetic oligonucleotide
gaacacaaagcataggctgcggg

SEQ ID NO: 669 - DNA, 23 bp, Artificial Sequence
  Description of Artificial Sequence: Synthetic oligonucleotide
gaacacaaagcttagactgcggg

SEQ ID NO: 670 - DNA, 23 bp, Artificial Sequence
  Description of Artificial Sequence: Synthetic oligonucleotide
gaacacaaaggatagactgcggg

SEQ ID NO: 671 - DNA, 23 bp, Artificial Sequence
  Description of Artificial Sequence: Synthetic oligonucleotide
gaaggcagagcatagactgcggg

SEQ ID NO: 672 - DNA, 23 bp, Artificial Sequence
  Description of Artificial Sequence: Synthetic oligonucleotide
gaacgcagagcatagagtgcggg

SEQ ID NO: 673 - DNA, 23 bp, Artificial Sequence
  Description of Artificial Sequence: Synthetic oligonucleotide
gaacacaaagcatagactggggg

SEQ ID NO: 674 - DNA, 23 bp, Artificial Sequence
  Description of Artificial Sequence: Synthetic oligonucleotide
gagcgagaagcatagactgcggg

SEQ ID NO: 675 - DNA, 23 bp, Artificial Sequence
  Description of Artificial Sequence: Synthetic oligonucleotide
gaacacaaagcatagattgcggg

SEQ ID NO: 676 - DNA, 23 bp, Artificial Sequence
  Description of Artificial Sequence: Synthetic oligonucleotide
gagcgcaaagcatagactgcggt

SEQ ID NO: 677 - DNA, 23 bp, Artificial Sequence
  Description of Artificial Sequence: Synthetic oligonucleotide
gaacacaaagcatagagtgcggg

SEQ ID NO: 678 - DNA, 23 bp, Artificial Sequence
  Description of Artificial Sequence: Synthetic oligonucleotide
gaacacatagcatagactgcggg

SEQ ID NO: 679 - DNA, 23 bp, Artificial Sequence
  Description of Artificial Sequence: Synthetic oligonucleotide
gaacacaaagcatagactgcggc

SEQ ID NO: 680 - DNA, 23 bp, Artificial Sequence
  Description of Artificial Sequence: Synthetic oligonucleotide
gaacacaaagcatagactgcgga

SEQ ID NO: 681 - DNA, 23 bp, Artificial Sequence
  Description of Artificial Sequence: Synthetic oligonucleotide
gaacacaaagcatagaatgcggg

SEQ ID NO: 682 - DNA, 23 bp, Artificial Sequence
  Description of Artificial Sequence: Synthetic oligonucleotide
gaacacaaagcataaactgcggg

SEQ ID NO: 683 - DNA, 23 bp, Artificial Sequence
  Description of Artificial Sequence: Synthetic oligonucleotide
gagtgcggagcatagactgcggg

SEQ ID NO: 684 - DNA, 23 bp, Artificial Sequence
  Description of Artificial Sequence: Synthetic oligonucleotide
gcacgcgaagcatagactgcggg

SEQ ID NO: 685 - DNA, 23 bp, Artificial Sequence
  Description of Artificial Sequence: Synthetic oligonucleotide
gaacaagaagcatagactgcggg

SEQ ID NO: 686 - DNA, 23 bp, Artificial Sequence
  Description of Artificial Sequence: Synthetic oligonucleotide
gaaatcgaagcatagactgcggg

SEQ ID NO: 687 - DNA, 23 bp, Artificial Sequence
  Description of Artificial Sequence: Synthetic oligonucleotide
gaaagaaaagcatagactgcggg

SEQ ID NO: 688 - DNA, 23 bp, Artificial Sequence
  Description of Artificial Sequence: Synthetic oligonucleotide
gtacacaaagcatagactgcggg

SEQ ID NO: 689 - DNA, 23 bp, Artificial Sequence
  Description of Artificial Sequence: Synthetic oligonucleotide
gaacggaaagcatagattgcggg

SEQ ID NO: 690 - DNA, 23 bp, Artificial Sequence
  Description of Artificial Sequence: Synthetic oligonucleotide
gaacgcgaggcatagactgtggg

SEQ ID NO: 691 - DNA, 23 bp, Artificial Sequence
  Description of Artificial Sequence: Synthetic oligonucleotide
gaacactaagcatagactgcggg

SEQ ID NO: 692 - DNA, 23 bp, Artificial Sequence
  Description of Artificial Sequence: Synthetic oligonucleotide
gaacgcaaagcatagactgcgcg

SEQ ID NO: 693 - DNA, 23 bp, Artificial Sequence
  Description of Artificial Sequence: Synthetic oligonucleotide
gaacgcaaagcatagactggggg

SEQ ID NO: 694 - DNA, 23 bp, Artificial Sequence
  Description of Artificial Sequence: Synthetic oligonucleotide
gaacgcgaagcatagactgcggt

SEQ ID NO: 695 - DNA, 23 bp, Artificial Sequence
  Description of Artificial Sequence: Synthetic oligonucleotide
gaacgcgaagcatagactgcggc

SEQ ID NO: 696 - DNA, 23 bp, Artificial Sequence
  Description of Artificial Sequence: Synthetic oligonucleotide
gaacgcaaagcatagtctgcggg

SEQ ID NO: 697 - DNA, 23 bp, Artificial Sequence
  Description of Artificial Sequence: Synthetic oligonucleotide
gaacgcgaagcatagactgaagg

SEQ ID NO: 698 - DNA, 23 bp, Artificial Sequence
  Description of Artificial Sequence: Synthetic oligonucleotide
gaacgcaaaggatagactgcggg

SEQ ID NO: 699 - DNA, 23 bp, Artificial Sequence
  Description of Artificial Sequence: Synthetic oligonucleotide
gaacgcgaagcatagacagcggg

SEQ ID NO: 700 - DNA, 23 bp, Artificial Sequence
  Description of Artificial Sequence: Synthetic oligonucleotide
gaacgcgaagcatagaatgcggg

SEQ ID NO: 701 - DNA, 23 bp, Artificial Sequence
  Description of Artificial Sequence: Synthetic oligonucleotide
gaacgcaaggcatagactgtggg

SEQ ID NO: 702 - DNA, 23 bp, Artificial Sequence
  Description of Artificial Sequence: Synthetic oligonucleotide
gaacgcaagtcatagactgcggg

SEQ ID NO: 703 - DNA, 23 bp, Artificial Sequence
  Description of Artificial Sequence: Synthetic oligonucleotide
gaacgcaatgcatagactgcggg

SEQ ID NO: 704 - DNA, 23 bp, Artificial Sequence
  Description of Artificial Sequence: Synthetic oligonucleotide
gaacgcacagcatagactgcggg

SEQ ID NO: 705 - DNA, 23 bp, Artificial Sequence
  Description of Artificial Sequence: Synthetic oligonucleotide
gaacgccaaacatagactgcggg

SEQ ID NO: 706 - DNA, 23 bp, Artificial Sequence
  Description of Artificial Sequence: Synthetic oligonucleotide
gaacgcagagcacagactgcggg

SEQ ID NO: 707 - DNA, 23 bp, Artificial Sequence
  Description of Artificial Sequence: Synthetic oligonucleotide
gaacgcagatcatagactgcggg

SEQ ID NO: 708 - DNA, 23 bp, Artificial Sequence
  Description of Artificial Sequence: Synthetic oligonucleotide
gaacgcgaagcatagactggggg

SEQ ID NO: 709 - DNA, 23 bp, Artificial Sequence
  Description of Artificial Sequence: Synthetic oligonucleotide
gaacgcgaagcatagcctgcggg

SEQ ID NO: 710 - DNA, 23 bp, Artificial Sequence
  Description of Artificial Sequence: Synthetic oligonucleotide
gaacagaaagcatagactgcggg

SEQ ID NO: 711 - DNA, 23 bp, Artificial Sequence
  Description of Artificial Sequence: Synthetic oligonucleotide
gaacgcgaagcataggatgcggg

SEQ ID NO: 712 - DNA, 23 bp, Artificial Sequence
  Description of Artificial Sequence: Synthetic oligonucleotide
gaacccaaagtatagactgcggg

SEQ ID NO: 713 - DNA, 23 bp, Artificial Sequence
  Description of Artificial Sequence: Synthetic oligonucleotide
gaacgcggatcatagactgcggg

SEQ ID NO: 714 - DNA, 23 bp, Artificial Sequence
  Description of Artificial Sequence: Synthetic oligonucleotide
gaacgaaaagcacagactgcggg

SEQ ID NO: 715 - DNA, 23 bp, Artificial Sequence
  Description of Artificial Sequence: Synthetic oligonucleotide
gaacgcggagcaaagactgcggg

SEQ ID NO: 716 - DNA, 23 bp, Artificial Sequence
  Description of Artificial Sequence: Synthetic oligonucleotide
gaacgaaaggcatagactgcggg

SEQ ID NO: 717 - DNA, 23 bp, Artificial Sequence
  Description of Artificial Sequence: Synthetic oligonucleotide
gaacgcagagcatagactgcgga

SEQ ID NO: 718 - DNA, 23 bp, Artificial Sequence
  Description of Artificial Sequence: Synthetic oligonucleotide
gaacgcgaggcatagactgcgtg

SEQ ID NO: 719 - DNA, 23 bp, Artificial Sequence
  Description of Artificial Sequence: Synthetic oligonucleotide
gaacgagaagcgtagactgcggg

SEQ ID NO: 720 - DNA, 23 bp, Artificial Sequence
  Description of Artificial Sequence: Synthetic oligonucleotide
gaacgcaaaccatagactgcggg

SEQ ID NO: 721 - DNA, 23 bp, Artificial Sequence
  Description of Artificial Sequence: Synthetic oligonucleotide
gaacgcgaaggatagactgcggg

SEQ ID NO: 722 - DNA, 23 bp, Artificial Sequence
  Description of Artificial Sequence: Synthetic oligonucleotide
gaacgcaaagcatacactgcggg

SEQ ID NO: 723 - DNA, 23 bp, Artificial Sequence
  Description of Artificial Sequence: Synthetic oligonucleotide
gaacgcaaagcatagacagcggg

SEQ ID NO: 724 - DNA, 23 bp, Artificial Sequence
  Description of Artificial Sequence: Synthetic oligonucleotide
gaacgcgaagcattgactgcggg

SEQ ID NO: 725 - DNA, 23 bp, Artificial Sequence
  Description of Artificial Sequence: Synthetic oligonucleotide
gaacgcaaagcatagactgaagg

SEQ ID NO: 726 - DNA, 23 bp, Artificial Sequence
  Description of Artificial Sequence: Synthetic oligonucleotide
gaacgcgaagcataggctgcggg

SEQ ID NO: 727 - DNA, 23 bp, Artificial Sequence
  Description of Artificial Sequence: Synthetic oligonucleotide
gaacgcaaggcatagactgaggg

SEQ ID NO: 728 - DNA, 8961 bp, Artificial Sequence
  Description of Artificial Sequence: Synthetic polynucleotide
atatgccaagtacgccccctattgacgtcaatgacggtaaatggcccgcctggcattatgcccagtacatgaccttatgggactttcctacttggcagtacatctacgtattagtcatcgctattaccatggtgatgcggttttggcagtacatcaatgggcgtggatagcggtttgactcacggggatttccaagtctccaccccattgacgtcaatgggagtttgttttggcaccaaaatcaacgggactttccaaaatgtcgtaacaactccgccccattgacgcaaatgggcggtaggcgtgtacggtgggaggtctatataagcagagctggtttagtgaaccgtcagatccgctagagatccgcggccgctaatacgactcactatagggagagccgccaccatgaaacggacagccgacggaagcgagttcgagtcaccaaagaagaagcggaaagtctcctcagagactgggcctgtcgccgtcgatccaaccctgcgccgccggattgaacctcacgagtttgaagtgttctttgacccccgggagctgagaaaggagacatgcctgctgtacgagatcaactggggaggcaggcactccatctggaggcacacctctcagaacacaaataagcacgtggaggtgaacttcatcgagaagtttaccacagagcggtacttctgccccaataccagatgtagcatcacatggtttctgagctggtccccttgcggagagtgtagcagggccatcaccgagttcctgtccagatatccacacgtgacactgtttatctacatcgccaggctgtatcaccacgcagacccaaggaataggcagggcctgcgcgatctgatcagctccggcgtgaccatccagatcatgacagagcaggagtccggctactgctggcggaacttcgtgaattattctcctagcaacgaggcccactggcctaggtacccacacctgtgggtgcgcctgtacgtgctggagctgtattgcatcatcctgggcctgcccccttgtctgaatatcctgcggagaaagcagccccagctgaccttctttacaatcgccctgcagtcttgtcactatcagaggctgccaccccacatcctgtgggccacaggcctgaagtctggaggatctagcggaggatcctctggcagcgagacaccaggaacaagcgagtcagcaacaccagagagcagtggcggcagcagcggcggcagcgacaagaagtacagcatcggcctggccatcggcaccaactctgtgggctgggccgtgatcaccgacgagtacaaggtgcccagcaagaaattcaaggtgctgggcaacaccgaccggcacagcatcaagaagaacctgatcggagccctgctgttcgacagcggcgaaacagccgaggccacccggctgaagagaaccgccagaagaagatacaccagacggaagaaccggatctgctatctgcaagagatcttcagcaacgagatggccaaggtggacgacagcttcttccacagactggaagagtccttcctggtggaagaggataagaagcacgagcggcaccccatcttcggcaacatcgtggacgaggtggcctaccacgagaagtaccccaccatctaccacctgagaaagaaactggtggacagcaccgacaaggccgacctgcggctgatctatctggccctggcccacatgatcaagttccggggccacttcctgatcgagggcgacctgaaccccgacaacagcgacgtggacaagctgttcatccagctggtgcagacctacaaccagctgttcgaggaaaaccccatcaacgccagcggcgtggacgccaaggccatcctgtctgccagactgagcaagagcagacggctggaaaatctgatcgcccagctgcccggcgagaagaagaatggcctgttcggaaacctgattgccctgagcctgggcctgacccccaacttcaagagcaacttcgacctggccgaggatgccaaactgcagctgagcaaggacacctacgacgacgacctggacaacctgctggcccagatcggcgaccagtacgccgacctgtttctggccgccaagaacctgtccgacgccatcctgctgagcgacatcctgagagtgaacaccgagatcaccaaggcccccctgagcgcctctatgatcaagagatacgacgagcaccaccaggacctgaccctgctgaaagctctcgtgcggcagcagctgcctgagaagtacaaagagattttcttcgaccagagcaagaacggctacgccggctacattgacggcggagccagccaggaagagttctacaagttcatcaagcccatcctggaaaagatggacggcaccgaggaactgctcgtgaagctgaacagagaggacctgctgcggaagcagcggaccttcgacaacggcagcatcccccaccagatccacctgggagagctgcacgccattctgcggcggcaggaagatttttacccattcctgaaggacaaccgggaaaagatcgagaagatcctgaccttccgcatcccctactacgtgggccctctggccaggggaaacagcagattcgcctggatgaccagaaagagcgaggaaaccatcaccccctggaacttcgaggaagtggtggacaagggcgcttccgcccagagcttcatcgagcggatgaccaacttcgataagaacctgcccaacgagaaggtgctgcccaagcacagcctgctgtacgagtacttcaccgtgtataacgagctgaccaaagtgaaatacgtgaccgagggaatgagaaagcccgccttcctgagcggcgagcagaaaaaggccatcgtggacctgctgttcaagaccaaccggaaagtgaccgtgaagcagctgaaagaggactacttcaagaaaatcgagtgcttcgactccgtggaaatctccggcgtggaagatcggttcaacgcctccctgggcacataccacgatctgctgaaaattatcaaggacaaggacttcctggacaatgaggaaaacgaggacattctggaagatatcgtgctgaccctgacactgtttgaggacagagagatgatcgaggaacggctgaaaacctatgcccacctgttcgacgacaaagtgatgaagcagctgaagcggcggagatacaccggctggggcaggctgagccggaagctgatcaacggcatccgggacaagcagtccggcaagacaatcctggatttcctgaagtccgacggcttcgccaacagaaacttcatgcagctgatccacgacgacagcctgacctttaaagaggacatccagaaagcccaggtgtccggccagggcgatagcctgcacgagcacattgccaatctggccggcagccccgccattaagaagggcatcctgcagacagtgaaggtggtggacgagctcgtgaaagtgatgggccggcacaagcccgagaacatcgtgatcgaaatggccagagagaaccagaccacccagaagggacagaagaacagccgcgagagaatgaagcggatcgaagagggcatcaaagagctgggcagccagatcctgaaagaacaccccgtggaaaacacccagctgcagaacgagaagctgtacctgtactacctgcagaatgggcgggatatgtacgtggaccaggaactggacatcaaccggctgtccgactacgatgtggaccatatcgtgcctcagagctttctgaaggacgactccatcgacaacaaggtgctgaccagaagcgacaagaaccggggcaagagcgacaacgtgccctccgaagaggtcgtgaagaagatgaagaactactggcggcagctgctgaacgccaagctgattacccagagaaagttcgacaatctgaccaaggccgagagaggcggcctgagcgaactggataaggccggcttcatcaagagacagctggtggaaacccggcagatcacaaagcacgtggcacagatcctggactcccggatgaacactaagtacgacgagaatgacaagctgatccgggaagtgaaagtgatcaccctgaagtccaagctggtgtccgatttccggaaggatttccagttttacaaagtgcgcgagatcaacaactaccaccacgcccacgacgcctacctgaacgccgtcgtgggaaccgccctgatcaaaaagtaccctaagctggaaagcgagttcgtgtacggcgactacaaggtgtacgacgtgcggaagatgatcgccaagagcgagcaggaaatcggcaaggctaccgccaagtacttcttctacagcaacatcatgaactttttcaagaccgagattaccctggccaacggcgagatccggaagcggcctctgatcgagacaaacggcgaaaccggggagatcgtgtgggataagggccgggattttgccaccgtgcggaaagtgctgagcatgccccaagtgaatatcgtgaaaaagaccgaggtgcagacaggcggcttcagcaaagagtctatcctgcccaagaggaacagcgataagctgatcgccagaaagaaggactgggaccctaagaagtacggcggcttcgacagccccaccgtggcctattctgtgctggtggtggccaaagtggaaaagggcaagtccaagaaactgaagagtgtgaaagagctgctggggatcaccatcatggaaagaagcagcttcgagaagaatcccatcgactttctggaagccaagggctacaaagaagtgaaaaaggacctgatcatcaagctgcctaagtactccctgttcgagctggaaaacggccggaagagaatgctggcctctgccggcgaactgcagaagggaaacgaactggccctgccctccaaatatgtgaacttcctgtacctggccagccactatgagaagctgaagggctcccccgaggataatgagcagaaacagctgtttgtggaacagcacaagcactacctggacgagatcatcgagcagatcagcgagttctccaagagagtgatcctggccgacgctaatctggacaaagtgctgtccgcctacaacaagcaccgggataagcccatcagagagcaggccgagaatatcatccacctgtttaccctgaccaatctgggagcccctgccgccttcaagtactttgacaccaccatcgaccggaagaggtacaccagcaccaaagaggtgctggacgccaccctgatccaccagagcatcaccggcctgtacgagacacggatcgacctgtctcagctgggaggtgacagcggcgggagcggcgggagcggggggagcactaatctgagcgacatcattgagaaggagactgggaaacagctggtcattcaggagtccatcctgatgctgcctgaggaggtggaggaagtgatcggcaacaagccagagtctgacatcctggtgcacaccgcctacgacgagtccacagatgagaatgtgatgctgctgacctctgacgcccccgagtataagccttgggccctggtcatccaggattctaacggcgagaataagatcaagatgctgagcggaggatccggaggatctggaggcagcaccaacctgtctgacatcatcgagaaggagacaggcaagcagctggtcatccaggagagcatcctgatgctgcccgaagaagtcgaagaagtgatcggaaacaagcctgagagcgatatcctggtccataccgcctacgacgagagtaccgacgaaaatgtgatgctgctgacatccgacgccccagagtataagccctgggctctggtcatccaggattccaacggagagaacaaaatcaaaatgctgtctggcggctcaaaaagaaccgccgacggcagcgaattcgagcccaagaagaagaggaaagtctaaccggtcatcatcaccatcaccattgagtttaaacccgctgatcagcctcgactgtgccttctagttgccagccatctgttgtttgcccctcccccgtgccttccttgaccctggaaggtgccactcccactgtcctttcctaataaaatgaggaaattgcatcgcattgtctgagtaggtgtcattctattctggggggtggggtggggcaggacagcaagggggaggattgggaagacaatagcaggcatgctggggatgcggtgggctctatggcttctgaggcggaaagaaccagctggggctcgataccgtcgacctctagctagagcttggcgtaatcatggtcatagctgtttcctgtgtgaaattgttatccgctcacaattccacacaacatacgagccggaagcataaagtgtaaagcctagggtgcctaatgagtgagctaactcacattaattgcgttgcgctcactgcccgctttccagtcgggaaacctgtcgtgccagctgcattaatgaatcggccaacgcgcggggagaggcggtttgcgtattgggcgctcttccgcttcctcgctcactgactcgctgcgctcggtcgttcggctgcggcgagcggtatcagctcactcaaaggcggtaatacggttatccacagaatcaggggataacgcaggaaagaacatgtgagcaaaaggccagcaaaaggccaggaaccgtaaaaaggccgcgttgctggcgtttttccataggctccgcccccctgacgagcatcacaaaaatcgacgctcaagtcagaggtggcgaaacccgacaggactataaagataccaggcgtttccccctggaagctccctcgtgcgctctcctgttccgaccctgccgcttaccggatacctgtccgcctttctcccttcgggaagcgtggcgctttctcatagctcacgctgtaggtatctcagttcggtgtaggtcgttcgctccaagctgggctgtgtgcacgaaccccccgttcagcccgaccgctgcgccttatccggtaactatcgtcttgagtccaacccggtaagacacgacttatcgccactggcagcagccactggtaacaggattagcagagcgaggtatgtaggcggtgctacagagttcttgaagtggtggcctaactacggctacactagaagaacagtatttggtatctgcgctctgctgaagccagttaccttcggaaaaagagttggtagctcttgatccggcaaacaaaccaccgctggtagcggtggtttttttgtttgcaagcagcagattacgcgcagaaaaaaaggatctcaagaagatcctttgatcttttctacggggtctgacactcagtggaacgaaaactcacgttaagggattttggtcatgagattatcaaaaaggatcttcacctagatccttttaaattaaaaatgaagttttaaatcaatctaaagtatatatgagtaaacttggtctgacagttaccaatgcttaatcagtgaggcacctatctcagcgatctgtctatttcgttcatccatagttgcctgactccccgtcgtgtagataactacgatacgggagggcttaccatctggccccagtgctgcaatgataccgcgagacccacgctcaccggctccagatttatcagcaataaaccagccagccggaagggccgagcgcagaagtggtcctgcaactttatccgcctccatccagtctattaattgttgccgggaagctagagtaagtagttcgccagttaatagtttgcgcaacgttgttgccattgctacaggcatcgtggtgtcacgctcgtcgtttggtatggcttcattcagctccggttcccaacgatcaaggcgagttacatgatcccccatgttgtgcaaaaaagcggttagctccttcggtcctccgatcgttgtcagaagtaagttggccgcagtgttatcactcatggttatggcagcactgcataattctcttactgtcatgccatccgtaagatgcttttctgtgactggtgagtactcaaccaagtcattctgagaatagtgtatgcggcgaccgagttgctcttgcccggcgtcaatacgggataataccgcgccacatagcagaactttaaaagtgctcatcattggaaaacgttcttcggggcgaaaactctcaaggatcttaccgctgttgagatccagttcgatgtaacccactcgtgcacccaactgatcttcagcatcttttactttcaccagcgtttctgggtgagcaaaaacaggaaggcaaaatgccgcaaaaaagggaataagggcgacacggaaatgttgaatactcatactcttcctttttcaatattattgaagcatttatcagggttattgtctcatgagcggatacatatttgaatgtatttagaaaaataaacaaataggggttccgcgcacatttccccgaaaagtgccacctgacgtcgacggatcgggagatcgatctcccgatcccctagggtcgactctcagtacaatctgctctgatgccgcatagttaagccagtatctgctccctgcttgtgtgttggaggtcgctgagtagtgcgcgagcaaaatttaagctacaacaaggcaaggcttgaccgacaattgcatgaagaatctgcttagggttaggcgttttgcgctgcttcgcgatgtacgggccagatatacgcgttgacattgattattgactagttattaatagtaatcaattacggggtcattagttcatagcccatatatggagttccgcgttacataacttacggtaaatggcccgcctggctgaccgcccaacgacccccgcccattgacgtcaataatgacgtatgttcccatagtaacgccaatagggactttccattgacgtcaatgggtggagtatttacggtaaactgcccacttggcagtacatcaagtgtatc

SEQ ID NO: 729 - DNA, 8811 bp, Artificial Sequence
  Description of Artificial Sequence: Synthetic polynucleotide
atatgccaagtacgccccctattgacgtcaatgacggtaaatggcccgcctggcattatgcccagtacatgaccttatgggactttcctacttggcagtacatctacgtattagtcatcgctattaccatggtgatgcggttttggcagtacatcaatgggcgtggatagcggtttgactcacggggatttccaagtctccaccccattgacgtcaatgggagtttgttttggcaccaaaatcaacgggactttccaaaatgtcgtaacaactccgccccattgacgcaaatgggcggtaggcgtgtacggtgggaggtctatataagcagagctggtttagtgaaccgtcagatccgctagagatccgcggccgctaatacgactcactatagggagagccgccaccatgaaacggacagccgacggaagcgagttcgagtcaccaaagaagaagcggaaagtctctgaagtcgagtttagccacgagtattggatgaggcacgcactgaccctggcaaagcgagcatgggatgaaagagaagtccccgtgggcgccgtgctggtgcacaacaatagagtgatcggagagggatggaacaggccaatcggccgccacgaccctaccgcacacgcagagatcatggcactgaggcagggaggcctggtcatgcagaattaccgcctgatcgatgccaccctgtatgtgacactggagccatgcgtgatgtgcgcaggagcaatgatccacagcaggatcggaagagtggtgttcggagcacgggacgccaagaccggcgcagcaggctccctgatggatgtgctgcaccaccccggcatgaaccaccgggtggagatcacagagggaatcctggcagacgagtgcgccgccctgctgagcgatttctttagaatgcggagacaggagatcaaggcccagaagaaggcacagagctccaccgactctggaggatctagcggaggatcctctggaagcgagacaccaggcacaagcgagtccgccacaccagagagctccggcggctcctccggaggatcctctgaggtggagttttcccacgagtactggatgagacatgccctgaccctggccaagagggcacgcgatgagagggaggtgcctgtgggagccgtgctggtgctgaacaatagagtgatcggcgagggctggaacagagccatcggcctgcacgacccaacagcccatgccgaaattatggccctgagacagggcggcctggtcatgcagaactacagactgattgacgccaccctgtacgtgacattcgagccttgcgtgatgtgcgccggcgccatgatccactctaggatcggccgcgtggtgtttggcgtgaggaacgcaaaaaccggcgccgcaggctccctgatggacgtgctgcactaccccggcatgaatcaccgcgtcgaaattaccgagggaatcctggcagatgaatgtgccgccctgctgtgctatttctttcggatgcctagacaggtgttcaatgctcagaagaaggcccagagctccaccgactccggaggatctagcggaggctcctctggctctgagacacctggcacaagcgagagcgcaacacctgaaagcagcgggggcagcagcggggggtcagacaagaagtacagcatcggcctggccatcggcaccaactctgtgggctgggccgtgatcaccgacgagtacaaggtgcccagcaagaaattcaaggtgctgggcaacaccgaccggcacagcatcaagaagaacctgatcggagccctgctgttcgacagcggcgaaacagccgaggccacccggctgaagagaaccgccagaagaagatacaccagacggaagaaccggatctgctatctgcaagagatcttcagcaacgagatggccaaggtggacgacagcttcttccacagactggaagagtccttcctggtggaagaggataagaagcacgagcggcaccccatcttcggcaacatcgtggacgaggtggcctaccacgagaagtaccccaccatctaccacctgagaaagaaactggtggacagcaccgacaaggccgacctgcggctgatctatctggccctggcccacatgatcaagttccggggccacttcctgatcgagggcgacctgaaccccgacaacagcgacgtggacaagctgttcatccagctggtgcagacctacaaccagctgttcgaggaaaaccccatcaacgccagcggcgtggacgccaaggccatcctgtctgccagactgagcaagagcagacggctggaaaatctgatcgcccagctgcccggcgagaagaagaatggcctgttcggaaacctgattgccctgagcctgggcctgacccccaacttcaagagcaacttcgacctggccgaggatgccaaactgcagctgagcaaggacacctacgacgacgacctggacaacctgctggcccagatcggcgaccagtacgccgacctgtttctggccgccaagaacctgtccgacgccatcctgctgagcgacatcctgagagtgaacaccgagatcaccaaggcccccctgagcgcctctatgatcaagagatacgacgagcaccaccaggacctgaccctgctgaaagctctcgtgcggcagcagctgcctgagaagtacaaagagattttcttcgaccagagcaagaacggctacgccggctacattgacggcggagccagccaggaagagttctacaagttcatcaagcccatcctggaaaagatggacggcaccgaggaactgctcgtgaagctgaacagagaggacctgctgcggaagcagcggaccttcgacaacggcagcatcccccaccagatccacctgggagagctgcacgccattctgcggcggcaggaagatttttacccattcctgaaggacaaccgggaaaagatcgagaagatcctgaccttccgcatcccctactacgtgggccctctggccaggggaaacagcagattcgcctggatgaccagaaagagcgaggaaaccatcaccccctggaacttcgaggaagtggtggacaagggcgcttccgcccagagcttcatcgagcggatgaccaacttcgataagaacctgcccaacgagaaggtgctgcccaagcacagcctgctgtacgagtacttcaccgtgtataacgagctgaccaaagtgaaatacgtgaccgagggaatgagaaagcccgccttcctgagcggcgagcagaaaaaggccatcgtggacctgctgttcaagaccaaccggaaagtgaccgtgaagcagctgaaagaggactacttcaagaaaatcgagtgcttcgactccgtggaaatctccggcgtggaagatcggttcaacgcctccctgggcacataccacgatctgctgaaaattatcaaggacaaggacttcctggacaatgaggaaaacgaggacattctggaagatatcgtgctgaccctgacactgtttgaggacagagagatgatcgaggaacggctgaaaacctatgcccacctgttcgacgacaaagtgatgaagcagctgaagcggcggagatacaccggctggggcaggctgagccggaagctgatcaacggcatccgggacaagcagtccggcaagacaatcctggatttcctgaagtccgacggcttcgccaacagaaacttcatgcagctgatccacgacgacagcctgacctttaaagaggacatccagaaagcccaggtgtccggccagggcgatagcctgcacgagcacattgccaatctggccggcagccccgccattaagaagggcatcctgcagacagtgaaggtggtggacgagctcgtgaaagtgatgggccggcacaagcccgagaacatcgtgatcgaaatggccagagagaaccagaccacccagaagggacagaagaacagccgcgagagaatgaagcggatcgaagagggcatcaaagagctgggcagccagatcctgaaagaacaccccgtggaaaacacccagctgcagaacgagaagctgtacctgtactacctgcagaatgggcgggatatgtacgtggaccaggaactggacatcaaccggctgtccgactacgatgtggaccatatcgtgcctcagagctttctgaaggacgactccatcgacaacaaggtgctgaccagaagcgacaagaaccggggcaagagcgacaacgtgccctccgaagaggtcgtgaagaagatgaagaactactggcggcagctgctgaacgccaagctgattacccagagaaagttcgacaatctgaccaaggccgagagaggcggcctgagcgaactggataaggccggcttcatcaagagacagctggtggaaacccggcagatcacaaagcacgtggcacagatcctggactcccggatgaacactaagtacgacgagaatgacaagctgatccgggaagtgaaagtgatcaccctgaagtccaagctggtgtccgatttccggaaggatttccagttttacaaagtgcgcgagatcaacaactaccaccacgcccacgacgcctacctgaacgccgtcgtgggaaccgccctgatcaaaaagtaccctaagctggaaagcgagttcgtgtacggcgactacaaggtgtacgacgtgcggaagatgatcgccaagagcgagcaggaaatcggcaaggctaccgccaagtacttcttctacagcaacatcatgaactttttcaagaccgagattaccctggccaacggcgagatccggaagcggcctctgatcgagacaaacggcgaaaccggggagatcgtgtgggataagggccgggattttgccaccgtgcggaaagtgctgagcatgccccaagtgaatatcgtgaaaaagaccgaggtgcagacaggcggcttcagcaaagagtctatcctgcccaagaggaacagcgataagctgatcgccagaaagaaggactgggaccctaagaagtacggcggcttcgacagccccaccgtggcctattctgtgctggtggtggccaaagtggaaaagggcaagtccaagaaactgaagagtgtgaaagagctgctggggatcaccatcatggaaagaagcagcttcgagaagaatcccatcgactttctggaagccaagggctacaaagaagtgaaaaaggacctgatcatcaagctgcctaagtactccctgttcgagctggaaaacggccggaagagaatgctggcctctgccggcgaactgcagaagggaaacgaactggccctgccctccaaatatgtgaacttcctgtacctggccagccactatgagaagctgaagggctcccccgaggataatgagcagaaacagctgtttgtggaacagcacaagcactacctggacgagatcatcgagcagatcagcgagttctccaagagagtgatcctggccgacgctaatctggacaaagtgctgtccgcctacaacaagcaccgggataagcccatcagagagcaggccgagaatatcatccacctgtttaccctgaccaatctgggagcccctgccgccttcaagtactttgacaccaccatcgaccggaagaggtacaccagcaccaaagaggtgctggacgccaccctgatccaccagagcatcaccggcctgtacgagacacggatcgacctgtctcagctgggaggtgactctggcggctcaaaaagaaccgccgacggcagcgaattcgagcccaagaagaagaggaaagtctaaccggtcatcatcaccatcaccattgagtttaaacccgctgatcagcctcgactgtgccttctagttgccagccatctgttgtttgcccctcccccgtgccttccttgaccctggaaggtgccactcccactgtcctttcctaataaaatgaggaaattgcatcgcattgtctgagtaggtgtcattctattctggggggtggggtggggcaggacagcaagggggaggattgggaagacaatagcaggcatgctggggatgcggtgggctctatggcttctgaggcggaaagaaccagctggggctcgataccgtcgacctctagctagagcttggcgtaatcatggtcatagctgtttcctgtgtgaaattgttatccgctcacaattccacacaacatacgagccggaagcataaagtgtaaagcctagggtgcctaatgagtgagctaactcacattaattgcgttgcgctcactgcccgctttccagtcgggaaacctgtcgtgccagctgcattaatgaatcggccaacgcgcggggagaggcggtttgcgtattgggcgctcttccgcttcctcgctcactgactcgctgcgctcggtcgttcggctgcggcgagcggtatcagctcactcaaaggcggtaatacggttatccacagaatcaggggataacgcaggaaagaacatgtgagcaaaaggccagcaaaaggccaggaaccgtaaaaaggccgcgttgctggcgtttttccataggctccgcccccctgacgagcatcacaaaaatcgacgctcaagtcagaggtggcgaaacccgacaggactataaagataccaggcgtttccccctggaagctccctcgtgcgctctcctgttccgaccctgccgcttaccggatacctgtccgcctttctcccttcgggaagcgtggcgctttctcatagctcacgctgtaggtatctcagttcggtgtaggtcgttcgctccaagctgggctgtgtgcacgaaccccccgttcagcccgaccgctgcgccttatccggtaactatcgtcttgagtccaacccggtaagacacgacttatcgccactggcagcagccactggtaacaggattagcagagcgaggtatgtaggcggtgctacagagttcttgaagtggtggcctaactacggctacactagaagaacagtatttggtatctgcgctctgctgaagccagttaccttcggaaaaagagttggtagctcttgatccggcaaacaaaccaccgctggtagcggtggtttttttgtttgcaagcagcagattacgcgcagaaaaaaaggatctcaagaagatcctttgatcttttctacggggtctgacactcagtggaacgaaaactcacgttaagggattttggtcatgagattatcaaaaaggatcttcacctagatccttttaaattaaaaatgaagttttaaatcaatctaaagtatatatgagtaaacttggtctgacagttaccaatgcttaatcagtgaggcacctatctcagcgatctgtctatttcgttcatccatagttgcctgactccccgtcgtgtagataactacgatacgggagggcttaccatctggccccagtgctgcaatgataccgcgagacccacgctcaccggctccagatttatcagcaataaaccagccagccggaagggccgagcgcagaagtggtcctgcaactttatccgcctccatccagtctattaattgttgccgggaagctagagtaagtagttcgccagttaatagtttgcgcaacgttgttgccattgctacaggcatcgtggtgtcacgctcgtcgtttggtatggcttcattcagctccggttcccaacgatcaaggcgagttacatgatcccccatgttgtgcaaaaaagcggttagctccttcggtcctccgatcgttgtcagaagtaagttggccgcagtgttatcactcatggttatggcagcactgcataattctcttactgtcatgccatccgtaagatgcttttctgtgactggtgagtactcaaccaagtcattctgagaatagtgtatgcggcgaccgagttgctcttgcccggcgtcaatacgggataataccgcgccacatagcagaactttaaaagtgctcatcattggaaaacgttcttcggggcgaaaactctcaaggatcttaccgctgttgagatccagttcgatgtaacccactcgtgcacccaactgatcttcagcatcttttactttcaccagcgtttctgggtgagcaaaaacaggaaggcaaaatgccgcaaaaaagggaataagggcgacacggaaatgttgaatactcatactcttcctttttcaatattattgaagcatttatcagggttattgtctcatgagcggatacatatttgaatgtatttagaaaaataaacaaataggggttccgcgcacatttccccgaaaagtgccacctgacgtcgacggatcgggagatcgatctcccgatcccctagggtcgactctcagtacaatctgctctgatgccgcatagttaagccagtatctgctccctgcttgtgtgttggaggtcgctgagtagtgcgcgagcaaaatttaagctacaacaaggcaaggcttgaccgacaattgcatgaagaatctgcttagggttaggcgttttgcgctgcttcgcgatgtacgggccagatatacgcgttgacattgattattgactagttattaatagtaatcaattacggggtcattagttcatagcccatatatggagttccgcgttacataacttacggtaaatggcccgcctggctgaccgcccaacgacccccgcccattgacgtcaataatgacgtatgttcccatagtaacgccaatagggactttccattgacgtcaatgggtggagtatttacggtaaactgcccacttggcagtacatcaagtgtatc

SEQ ID NO: 730 - DNA, 8961 bp, Artificial Sequence
  Description of Artificial Sequence: Synthetic polynucleotide
atatgccaagtacgccccctattgacgtcaatgacggtaaatggcccgcctggcattatgcccagtacatgaccttatgggactttcctacttggcagtacatctacgtattagtcatcgctattaccatggtgatgcggttttggcagtacatcaatgggcgtggatagcggtttgactcacggggatttccaagtctccaccccattgacgtcaatgggagtttgttttggcaccaaaatcaacgggactttccaaaatgtcgtaacaactccgccccattgacgcaaatgggcggtaggcgtgtacggtgggaggtctatataagcagagctggtttagtgaaccgtcagatccgctagagatccgcggccgctaatacgactcactatagggagagccgccaccatgaaacggacagccgacggaagcgagttcgagtcaccaaagaagaagcggaaagtcagcagtgaaaccggaccagtggcagtggacccaaccctgaggagacggattgagccccatgaatttgaagtgttctttgacccaagggagctgaggaaggagacatgcctgctgtacgagatcaagtggggcacaagccacaagatctggcgccacagctccaagaacaccacaaagcacgtggaagtgaatttcatcgagaagtttacctccgagcggcacttctgcccctctaccagctgttccatcacatggtttctgtcttggagcccttgcggcgagtgttccaaggccatcaccgagttcctgtctcagcaccctaacgtgaccctggtcatctacgtggcccggctgtatcaccacatggaccagcagaacaggcagggcctgcgcgatctggtgaattctggcgtgaccatccagatcatgacagccccagagtacgactattgctggcggaacttcgtgaattatccacctggcaaggaggcacactggccaagatacccacccctgtggatgaagctgtatgcactggagctgcacgcaggaatcctgggcctgcctccatgtctgaatatcctgcggagaaagcagccccagctgacatttttcaccattgctctgcagtcttgtcactatcagcggctgcctcctcatattctgtgggctacaggcctgaagtctggaggatctagcggaggatcctctggcagcgagacaccaggaacaagcgagtcagcaacaccagagagcagtggcggcagcagcggcggcagcgacaagaagtacagcatcggcctggccatcggcaccaactctgtgggctgggccgtgatcaccgacgagtacaaggtgcccagcaagaaattcaaggtgctgggcaacaccgaccggcacagcatcaagaagaacctgatcggagccctgctgttcgacagcggcgaaacagccgaggccacccggctgaagagaaccgccagaagaagatacaccagacggaagaaccggatctgctatctgcaagagatcttcagcaacgagatggccaaggtggacgacagcttcttccacagactggaagagtccttcctggtggaagaggataagaagcacgagcggcaccccatcttcggcaacatcgtggacgaggtggcctaccacgagaagtaccccaccatctaccacctgagaaagaaactggtggacagcaccgacaaggccgacctgcggctgatctatctggccctggcccacatgatcaagttccggggccacttcctgatcgagggcgacctgaaccccgacaacagcgacgtggacaagctgttcatccagctggtgcagacctacaaccagctgttcgaggaaaaccccatcaacgccagcggcgtggacgccaaggccatcctgtctgccagactgagcaagagcagacggctggaaaatctgatcgcccagctgcccggcgagaagaagaatggcctgttcggaaacctgattgccctgagcctgggcctgacccccaacttcaagagcaacttcgacctggccgaggatgccaaactgcagctgagcaaggacacctacgacgacgacctggacaacctgctggcccagatcggcgaccagtacgccgacctgtttctggccgccaagaacctgtccgacgccatcctgctgagcgacatcctgagagtgaacaccgagatcaccaaggcccccctgagcgcctctatgatcaagagatacgacgagcaccaccaggacctgaccctgctgaaagctctcgtgcggcagcagctgcctgagaagtacaaagagattttcttcgaccagagcaagaacggctacgccggctacattgacggcggagccagccaggaagagttctacaagttcatcaagcccatcctggaaaagatggacggcaccgaggaactgctcgtgaagctgaacagagaggacctgctgcggaagcagcggaccttcgacaacggcagcatcccccaccagatccacctgggagagctgcacgccattctgcggcggcaggaagatttttacccattcctgaaggacaaccgggaaaagatcgagaagatcctgaccttccgcatcccctactacgtgggccctctggccaggggaaacagcagattcgcctggatgaccagaaagagcgaggaaaccatcaccccctggaacttcgaggaagtggtggacaagggcgcttccgcccagagcttcatcgagcggatgaccaacttcgataagaacctgcccaacgagaaggtgctgcccaagcacagcctgctgtacgagtacttcaccgtgtataacgagctgaccaaagtgaaatacgtgaccgagggaatgagaaagcccgccttcctgagcggcgagcagaaaaaggccatcgtggacctgctgttcaagaccaaccggaaagtgaccgtgaagcagctgaaagaggactacttcaagaaaatcgagtgcttcgactccgtggaaatctccggcgtggaagatcggttcaacgcctccctgggcacataccacgatctgctgaaaattatcaaggacaaggacttcctggacaatgaggaaaacgaggacattctggaagatatcgtgctgaccctgacactgtttgaggacagagagatgatcgaggaacggctgaaaacctatgcccacctgttcgacgacaaagtgatgaagcagctgaagcggcggagatacaccggctggggcaggctgagccggaagctgatcaacggcatccgggacaagcagtccggcaagacaatcctggatttcctgaagtccgacggcttcgccaacagaaacttcatgcagctgatccacgacgacagcctgacctttaaagaggacatccagaaagcccaggtgtccggccagggcgatagcctgcacgagcacattgccaatctggccggcagccccgccattaagaagggcatcctgcagacagtgaaggtggtggacgagctcgtgaaagtgatgggccggcacaagcccgagaacatcgtgatcgaaatggccagagagaaccagaccacccagaagggacagaagaacagccgcgagagaatgaagcggatcgaagagggcatcaaagagctgggcagccagatcctgaaagaacaccccgtggaaaacacccagctgcagaacgagaagctgtacctgtactacctgcagaatgggcgggatatgtacgtggaccaggaactggacatcaaccggctgtccgactacgatgtggaccatatcgtgcctcagagctttctgaaggacgactccatcgacaacaaggtgctgaccagaagcgacaagaaccggggcaagagcgacaacgtgccctccgaagaggtcgtgaagaagatgaagaactactggcggcagctgctgaacgccaagctgattacccagagaaagttcgacaatctgaccaaggccgagagaggcggcctgagcgaactggataaggccggcttcatcaagagacagctggtggaaacccggcagatcacaaagcacgtggcacagatcctggactcccggatgaacactaagtacgacgagaatgacaagctgatccgggaagtgaaagtgatcaccctgaagtccaagctggtgtccgatttccggaaggatttccagttttacaaagtgcgcgagatcaacaactaccaccacgcccacgacgcctacctaaacgccgtcgtgggaaccgccctgatcaaaaagtaccctaagctggaaagcgagttcgtgtacggcgactacaaggtgtacgacgtgcggaagatgatcgccaagagcgagcaggaaatcggcaaggctaccgccaagtacttcttctacagcaacatcatgaactttttcaagaccgagattaccctggccaacggcgagatccggaagcggcctctgatcgagacaaacggcgaaaccggggagatcgtgtgggataagggccgggattttgccaccgtgcggaaagtgctgagcatgccccaagtgaatatcgtgaaaaagaccgaggtgcagacaggcggcttcagcaaagagtctatcctgcccaagaggaacagcgataagctgatcgccagaaagaaggactgggaccctaagaagtacggcggcttcgacagccccaccgtggcctattctgtgctggtggtggccaaagtggaaaagggcaagtccaagaaactgaagagtgtgaaagagctgctggggatcaccatcatggaaagaagcagcttcgagaagaatcccatcgactttctggaagccaagggctacaaagaagtgaaaaaggacctgatcatcaagctgcctaagtactccctgttcgagctggaaaacggccggaagagaatgctggcctctgccggcgaactgcagaagggaaacgaactggccctgccctccaaatatgtgaacttcctgtacctggccagccactatgagaagctgaagggctcccccgaggataatgagcagaaacagctgtttgtggaacagcacaagcactacctggacgagatcatcgagcagatcagcgagttctccaagagagtgatcctggccgacgctaatctggacaaagtgctgtccgcctacaacaagcaccgggataagcccatcagagagcaggccgagaatatcatccacctgtttaccctgaccaatctgggagcccctgccgccttcaagtactttgacaccaccatcgaccggaagaggtacaccagcaccaaagaggtgctggacgccaccctgatccaccagagcatcaccggcctgtacgagacacggatcgacctgtctcagctgggaggtgacagcggcgggagcggcgggagcggggggagcactaatctgagcgacatcattgagaaggagactgggaaacagctggtcattcaggagtccatcctgatgctgcctgaggaggtggaggaagtgatcggcaacaagccagagtctgacatcctggtgcacaccgcctacgacgagtccacagatgagaatgtgatgctgctgacctctgacgcccccgagtataagccttgggccctggtcatccaggattctaacggcgagaataagatcaagatgctgagcggaggatccggaggatctggaggcagcaccaacctgtctgacatcatcgagaaggagacaggcaagcagctggtcatccaggagagcatcctgatgctgcccgaagaagtcgaagaagtgatcggaaacaagcctgagagcgatatcctggtccataccgcctacgacgagagtaccgacgaaaatgtgatgctgctgacatccgacgccccagagtataagccctgggctctggtcatccaggattccaacggagagaacaaaatcaaaatgctgtctggcggctcaaaaagaaccgccgacggcagcgaattcgagcccaagaagaagaggaaagtctaaccggtcatcatcaccatcaccattgagtttaaacccgctgatcagcctcgactgtgccttctagttgccagccatctgttgtttgcccctcccccgtgccttccttgaccctggaaggtgccactcccactgtcctttcctaataaaatgaggaaattgcatcgcattgtctgagtaggtgtcattctattctggggggtggggtggggcaggacagcaagggggaggattgggaagacaatagcaggcatgctggggatgcggtgggctctatggcttctgaggcggaaagaaccagctggggctcgataccgtcgacctctagctagagcttggcgtaatcatggtcatagctgtttcctgtgtgaaattgttatccgctcacaattccacacaacatacgagccggaagcataaagtgtaaagcctaggatgcctaatgagtgagctaactcacattaattgcgttgcgctcactgcccgctttccagtcgggaaacctgtcgtgccagctgcattaatgaatcggccaacgcgcgggaagaggcggtttgcgtattgggcgctcttccgcttcctcgctcactgactcgctgcgctcggtcgttcggctgcggcgagcggtatcagctcactcaaaggcggtaatacggttatccacagaatcaggggataacgcaggaaagaacatgtgagcaaaaggccagcaaaaggccaggaaccgtaaaaaggccgcgttgctggcgtttttccataggctccgcccccctgacgagcatcacaaaaatcgacgctcaagtcagaggtggcgaaacccgacaggactataaagataccaggcgtttccccctggaagctccctcgtgcgctctcctgttccgaccctgccgcttaccggatacctgtccgcctttctcccttcgggaagcgtggcgctttctcatagctcacgctgtaggtatctcagttcggtgtaggtcgttcgctccaagctgggctgtgtgcacgaaccccccgttcagcccgaccgctgcgccttatccggtaactatcgtcttgagtccaacccggtaagacacgacttatcgccactggcagcagccactggtaacaggattagcagagcgaggtatgtaggcggtgctacagagttcttgaagtggtggcctaactacggctacactagaagaacagtatttggtatctgcgctctgctgaagccagttaccttcggaaaaagagttggtagctcttgatccggcaaacaaaccaccgctggtagcggtggtttttttgtttgcaagcagcagattacgcgcagaaaaaaaggatctcaagaagatcctttgatcttttctacggggtctgacactcagtggaacgaaaactcacgttaagggattttggtcatgagattatcaaaaaggatcttcacctagatccttttaaattaaaaatgaagttttaaatcaatctaaagtatatatgagtaaacttggtctgacagttaccaatgcttaatcagtgaggcacctatctcagcgatctgtctatttcgttcatccatagttgcctgactccccgtcgtgtagataactacgatacgggagggcttaccatctggccccagtgctgcaatgataccgcgagacccacgctcaccggctccagatttatcagcaataaaccagccagccggaagggccgagcgcagaagtggtcctgcaactttatccgcctccatccagtctattaattgttgccgggaagctagagtaagtagttcgccagttaatagtttgcgcaacgttgttgccattgctacaggcatcgtggtgtcacgctcgtcgtttggtatggcttcattcagctccggttcccaacgatcaaggcgagttacatgatcccccatgttgtgcaaaaaagcggttagctccttcggtcctccgatcgttgtcagaagtaagttggccgcagtgttatcactcatggttatggcagcactgcataattctcttactgtcatgccatccgtaagatgcttttctgtgactggtgagtactcaaccaagtcattctgagaatagtgtatgcggcgaccgagttgctcttgcccggcgtcaatacgggataataccgcgccacatagcagaactttaaaagtgctcatcattggaaaacgttcttcggggcgaaaactctcaaggatcttaccgctgttgagatccagttcgatgtaacccactcgtgcacccaactgatcttcagcatcttttactttcaccagcgtttctgggtgagcaaaaacaggaaggcaaaatgccgcaaaaaagggaataagggcgacacggaaatgttgaatactcatactcttcctttttcaatattattgaagcatttatcagggttattgtctcatgagcggatacatatttgaatgtatttagaaaaataaacaaataggggttccgcgcacatttccccgaaaagtgccacctgacgtcgacggatcgggagatcgatctcccgatcccctagggtcgactctcagtacaatctgctctgatgccgcatagttaagccagtatctgctccctgcttgtgtgttggaggtcgctgagtagtgcgcgagcaaaatttaagctacaacaaggcaaggcttgaccgacaattgcatgaagaatctgcttagggttaggcgttttgcgctgcttcgcgatgtacgggccagatatacgcgttgacattgattattgactagttattaatagtaatcaattacggggtcattagttcatagcccatatatggagttccgcgttacataacttacggtaaatggcccgcctggctgaccgcccaacgacccccgcccattgacgtcaataatgacgtatgttcccatagtaacgccaatagggactttccattgacgtcaatgggtggagtatttacggtaaactgcccacttggcagtacatcaagtgtatc

1. A multi-effector nucleobase editor polypeptide comprising a domain having nucleic acid sequence specific binding activity and two or more nucleobase editor domains selected from the group consisting of an adenosine deaminase, a cytidine deaminase, and an abasic editor.

2. The polypeptide of claim 1, further comprising one or more Nuclear Localization Signals (NLS) and/or one or more Uracil DNA glycosylase inhibitors (UGIs).

3. The polypeptide of claim 2, wherein the NLS is a bipartite NLS.

4. The polypeptide of claim 3, wherein the polypeptide comprises an N-terminal NLS and a C-terminal NLS.

5-6. (canceled)

7. The polypeptide of claim 1, wherein the adenosine deaminase is a TadA deaminase.

8. The polypeptide of claim 7, wherein the TadA deaminase is a modified adenosine deaminase that does not occur in nature.

9. The polypeptide of claim 1, wherein the polypeptide comprises two adenosine deaminases that are the same or different.

10. The polypeptide of claim 9, wherein the two adenosine deaminases are capable of forming heterodimers or homodimers.

11. The polypeptide of claim 10, wherein the two adenosine deaminase domains are wild-type TadA and TadA7.10.

12. The polypeptide of claim 1, wherein the domain having nucleic acid sequence specific binding activity is a nucleic acid programmable DNA binding protein (napDNAbp).

13. The polypeptide of claim 12, wherein the napDNAbp domain comprises a nuclease dead Cas9 (dCas9), a Cas9 nickase (nCas9), or a nuclease active Cas9.

14. The polypeptide of claim 12, wherein the napDNAbp is selected from the group consisting of Cas9, Cas12a/Cpf1, Cas12b/C2c1, Cas12c/C2c3, Cas12d/CasY, Cas12e/CasX, Cas12g, Cas12h, and Cas12i, or active fragments thereof.

15-22. (canceled)

23. A multi-effector nucleobase editor polypeptide comprising one or more Nuclear Localization Signal (NLS), a napDNAbp, a Uracil DNA glycosylase inhibitor, an adenosine deaminase, and a cytidine deaminase.

24-27. (canceled)

28. A Multi-Effector Nucleobase Editor polypeptide comprising the following domains A-C, A-D, or A-E:
NH₂-[A-B-C]-COOH,
NH₂-[A-B-C-D]-COOH, or
NH₂-[A-B-C-D-E]-COOH
wherein A and C or A, C, and E, each comprises one or more of the following:
an adenosine deaminase domain or an active fragment thereof,
a cytidine deaminase domain or an active fragment thereof,
a DNA glycosylase domain or an active fragment thereof; and
wherein B or B and D, each comprises one or more domains having nucleic acid sequence specific binding activity.

29. The Multi-Effector Nucleobase Editor polypeptide of claim 28, comprising:
NH₂-[Aₙ-Bₒ-Cₙ]-COOH,
NH₂-[Aₙ-Bₒ-Cₙ-Dₒ]-COOH, or
NH₂-[Aₙ-Bₒ-Cₚ-Dₒ-E_{q}]-COOH;
wherein A and C or A, C, and E, each comprises one or more of the following:
an adenosine deaminase domain or an active fragment thereof,
a cytidine deaminase domain or an active fragment thereof, and
a DNA glycosylase domain or an active fragment thereof; and
wherein n is an integer: 1, 2, 3, 4, or 5, wherein p is an integer: 0, 1, 2, 3, 4, or 5; wherein q is an integer 0, 1, 2, 3, 4, or 5; and
wherein B or B and D each comprises a domain having nucleic acid sequence specific binding activity; and wherein o is an integer: 1, 2, 3, 4, or 5.

30-48. (canceled)

49. A polynucleotide molecule encoding the multi-effector nucleobase editor polypeptide of claim 1.

50. (canceled)

51. An expression vector comprising a polynucleotide molecule of claim 49.

52. The expression vector of claim 51, wherein the expression vector is a mammalian expression vector; or wherein the vector is a viral vector selected from the group consisting of adeno-associated virus (AAV), retroviral vector, adenoviral vector, lentiviral vector, Sendai virus vector, and herpesvirus vector.

53-54. (canceled)

55. A cell comprising the polynucleotide of claim 49.

56. The cell of claim 55, wherein the cell is a bacterial cell, plant cell, insect cell, or mammalian cell.

57. A molecular complex comprising the multi-effector nucleobase editor polypeptide of claim 1 and one or more of a guide RNA, tracrRNA, or target DNA molecule.

58. A kit comprising the multi-effector nucleobase editor polypeptide of claim 1.

59. A method of editing a nucleobase of a nucleic acid sequence, the method comprising contacting a nucleic acid sequence with a base editor comprising: the multi-effector nucleobase editor polypeptide of claim 1 and converting a first nucleobase of the nucleic acid sequence to a second nucleobase.

60-63. (canceled)

64. A method of editing a regulatory sequence present in the genome of a cell, the method comprising contacting a regulatory sequence with a base editor comprising: the multi-effector nucleobase editor polypeptide of claim 1 and converting a first and second nucleobase of the DNA sequence to a third and fourth nucleobase.

65. A method of editing a genome of a cell, the method comprising contacting the genome with a base editor comprising: the multi-effector nucleobase editor polypeptide of claim 1 and converting a first and second nucleobase of the DNA sequence to a third and fourth nucleobase.

66. (canceled)
